(19) United States
(12) Patent Application Publication
(10) Pub. No.: US 2023/0111813 A1
(43) Pub. Date: Apr. 13, 2023

(54) TRANSTHYRETIN (TTR) iRNA COMPOSITIONS AND METHODS OF USE THEREOF

(71) Applicant: Alnylam Pharmaceuticals, Inc., Cambridge, MA (US)

(72) Inventors: Mark K. Schlegel, Boston, MA (US); Adam Castoreno, Framingham, MA (US); James D. McIninch, Burlington, MA (US)

(21) Appl. No.: 17/935,997

(22) Filed: Sep. 28, 2022

Related U.S. Application Data
(63) Continuation of application No. PCT/US2022/039111, filed on Aug. 2, 2022.
(60) Provisional application No. 63/228,830, filed on Aug. 3, 2021.

(51) Int. Cl. C12N 15/113; A61K 31/713

(52) U.S. Cl. CPC C12N 15/113; A61K 31/713; C12N 2310/351; C12N 2310/315; C12N 2310/322; C12N 2320/30

(57) ABSTRACT

The present invention relates to RNAi agents, e.g., double stranded RNA (dsRNA) agents, targeting the transthyretin (TTR) gene. The invention also relates to methods of using such RNAi agents to inhibit expression of an TTR gene and to methods of preventing and treating an TTR-associated disorder, e.g., senile systemic amyloidosis (SSA), systemic familial amyloidosis, familial amyloidotic polyneuropathy (FAP), familial amyloidotic cardiomyopathy (FAC), leptomeningeal/Central Nervous System (CNS) amyloidosis, and hyperthyroxinemia.

### RELATED APPLICATION

[0001] This application is a 35 § U.S.C. 111(a) continuation application which claims the benefit of priority to PCT/US2022/039111, filed on Aug. 2, 2022, which, in turn, claims the benefit of priority to U.S. Provisional Application No. 63/228,830, filed on Aug. 3, 2021. The entire contents of each of the foregoing applications are incorporated herein by reference.

### SEQUENCE LISTING

[0002] The instant application contains a Sequence Listing which has been filed electronically in XML file format and is hereby incorporated by reference in its entirety. Said XML copy, created on Sep. 2, 2022, is named 121301_016502_SL.xml and is 4,037,579 bytes in size.

### BACKGROUND OF THE INVENTION

[0003] Transthyretin (TTR) (also known as prealbumin) is found in serum and cerebrospinal fluid (CSF). TTR transports retinol-binding protein (RBP) and thyroxine (T4) and also acts as a carrier of retinol (vitamin A) through its association with RBP in the blood and the CSF. Transthyretin is named for its transport of thyroxine and retinol. TTR also functions as a protease and can cleave proteins including apoA-I (the major HDL apolipoprotein), amyloid 0-peptide, and neuropeptide Y. See Liz, M. A. et al. (2010) IUBMB Life, 62(6):429-435.

[0004] TTR is a tetramer of four identical 127-amino acid subunits (monomers) that are rich in beta sheet structure. Each monomer has two 4-stranded beta sheets and the shape of a prolate ellipsoid. Antiparallel beta-sheet interactions link monomers into dimers. A short loop from each monomer forms the main dimer-dimer interaction. These two pairs of loops separate the opposed, convex beta-sheets of the dimers to form an internal channel.

[0005] The liver is the major site of TTR expression. Other significant sites of expression include the choroid plexus, retina (particularly the retinal pigment epithelium) and pancreas.

[0006] Transthyretin is one of at least 27 distinct types of proteins that is a precursor protein in the formation of amyloid fibrils. See Guan, J. et al. (Nov. 4, 2011) Current perspectives on cardiac amyloidosis, Am J Physiol Heart Circ Physiol, doi:10.1152/ajpheart.00815.2011. Extracellular deposition of amyloid fibrils in organs and tissues is the hallmark of amyloidosis. Amyloid fibrils are composed of misfolded protein aggregates, which may result from either excess production of or specific mutations in precursor proteins. The amyloidogenic potential of TTR may be related to its extensive beta sheet structure; X-ray crystallographic studies indicate that certain amyloidogenic mutations destabilize the tetrameric structure of the protein. See, e.g., Saraiva M. J. M. (2002) Expert Reviews in Molecular Medicine, 4(12):1-11.

[0007] Amyloidosis is a general term for the group of amyloid diseases that are characterized by amyloid deposits. Amyloid diseases are classified based on their precursor protein; for example, the name starts with “A” for amyloid and is followed by an abbreviation of the precursor protein, e.g., ATTR for amloidogenic transthyretin. Ibid.

[0008] There are numerous TTR-associated diseases, most of which are amyloid diseases. Normal-sequence TTR is associated with cardiac amyloidosis in people who are elderly and is termed senile systemic amyloidosis (SSA) (also called senile cardiac amyloidosis (SCA) or cardiac amyloidosis). SSA often is accompanied by microscopic deposits in many other organs. TTR amyloidosis manifests in various forms. When the peripheral nervous system is affected more prominently, the disease is termed familial amyloidotic polyneuropathy (FAP). When the heart is primarily involved but the nervous system is not, the disease is called familial amyloidotic cardiomyopathy (FAC). A third major type of TTR amyloidosis is leptomeningeal amyloidosis, also known as leptomeningeal or meningocerebrovascular amyloidosis, central nervous system (CNS) amyloidosis, or amyloidosis VII form. Mutations in TTR may also cause amyloidotic vitreous opacities, carpal tunnel syndrome, and euthyroid hyperthyroxinemia, which is a non-amyloidotic disease thought to be secondary to an increased association of thyroxine with TTR due to a mutant TTR molecule with increased affinity for thyroxine. See, e.g., Moses et al. (1982) J. Clin. Invest., 86, 2025-2033.

[0009] Abnormal TTR alleles may be either inherited or acquired through somatic mutations. Guan, J. et al. (Nov. 4, 2011) Current perspectives on cardiac amyloidosis, Am J Physiol Heart Circ Physiol, doi:10.1152/ajpheart.00815.2011. Transthyretin associated ATTR is the most frequent form of hereditary systemic amyloidosis. Lobato, L. (2003) J. Nephrol., 16:438-442. TTR mutations accelerate the process of TTR amyloid formation and are the most important risk factor for the development of ATTR. More than 85 amyloidogenic TTR variants are known to cause systemic familial amyloidosis. TTR mutations usually give rise to systemic amyloid deposition, with particular involvement of the peripheral nervous system, although some mutations are associated with cardiomyopathy or vitreous opacities. Ibid.

[0010] The V30M mutation is the most prevalent TTR mutation. See, e.g., Lobato, L. (2003) J Nephrol, 16:438-442. The V1221 mutation is carried by 3.9% of the African American population and is the most common cause of FAC. Jacobson, D. R. et al. (1997) N. Engl. J. Med. 336 (7): 466-73. It is estimated that SSA affects more than 25% of the population over age 80. Westermark, P. et al. (1990) Proc. Natl. Acad. Sci. U.S.A. 87 (7): 2843-5.

[0011] Additional TTR-associated diseases include ocular diseases, e.g., Stargardt's disease, diabetic retinopathy, age-related macular degeneration (AMD), e.g., dry AMD and wet AMD; metabolic disorders, e.g., disorders of glucose and lipid homeostasis, e.g., insulin resistance associated with type II diabetes, and cardiovascular disease.

[0012] For example, a primary pathological defect in the heritable eye disorder Stargardt disease is excessive accumulation of cytotoxic lipofuscin bisretinoids in the retina. Age-dependent accumulation of lipofuscin in the retinal pigment epithelium (RPE) matches the age-dependent increase in the incidence of the atrophic (dry) form of age-related macular degeneration (AMD) and, therefore, is a key pathogenic factor contributing to AMD progression. Lipofuscin bisretinoid synthesis in the retina depends on the influx of serum retinol from the circulation into the RPE and formation of the tertiary retinol-binding protein 4 (RBP4)-transthyretin-retinol complex in the serum is required for this influx. Knocking down the expression of TTR, which regulates RBP4, has been shown to result in a significant drop in both the RBP4 level and the amount of retinol being delivered to the target tissue, thereby inhibiting the formation of lipofuscin bisretinoids.

[0013] In addition, elevated RBP4 in the circulation of type 2 diabetic patients was reported many years ago (Basualdo C, et al., (1997). J. Am. Coll. Nutr. 16, 39-45; Abahusain et al., (1999). Eur. J. Clin. Nutr. 53, 630-635) and transgenic overexpression of RBP4 or injection of human RBP4 in normal mice were shown to cause insulin resistance. In contrast, genetic deletion of RBP4 or lowering of circulating RBP4 levels had the opposite effect and protected mice from developing insulin resistance (Yang, Q., et al. (2005). Nature 436, 356-362). In addition, positive associations were documented for circulating RBP4 or RBP4 expression levels with established cardiovascular disease (CVD) risk factors, including metabolic syndrome, overall/central obesity, dyslipidemia, inflammatory markers, and hypertension (Qi Q, et al., J Clin Endocrinol Metab. 2007; 92:4827-4834; Ingelsson E, et al., Atherosclerosis. 2009; 206:239-244). As indicated above, TTR regulates RBP4 and, thus, decreasing TTR results in a decrease in RBP4.

[0014] Any available current treatments for TTR-associated diseases such ocular diseases, e.g., Stargardt's disease, diabetic retinopathy, age-related macular degeneration (AMD), e.g., dry AMD and wet AMD; a metabolic disorder, e.g., a disorder of glucose and lipid homeostasis, e.g., insulin resistance associated with type II diabetes, and a cardiovascular disease, are not fully effective and may result in serous side effects, such as conjunctival hemorrhage, increased eye pressure, infection, retinal detachment and eye inflammation. Similarly, current treatments for metabolic diseases, including dieting, exercise, and medications to help control blood pressure, cholesterol and blood sugar levels, are not always effective.

[0015] Accordingly, there is a need in the art for effective treatments for TTR-associated diseases.

### SUMMARY OF THE INVENTION

[0016] The present invention provides iRNA compositions which effect the RNA-induced silencing complex (RISC)-mediated cleavage of RNA transcripts of a gene encoding transthyretin (TTR). The TTR gene may be within a cell, e.g., a cell within a subject, such as a human subject. The present invention also provides methods of using the iRNA compositions of the invention for inhibiting the expression of an TTR gene and/or for treating a subject who would benefit from inhibiting or reducing the expression of an TTR gene, e.g., a subject suffering or prone to suffering from an TTR-associated disorder, e.g., senile systemic amyloidosis (SSA), systemic familial amyloidosis, familial amyloidotic polyneuropathy (FAP), familial amyloidotic cardiomyopathy (FAC), leptomeningeal/Central Nervous System (CNS) amyloidosis, hyperthyroxinemia, an ocular disease, e.g., Stargardt's disease, diabetic retinopathy, age-related macular degeneration (AMD), e.g., dry AMD and wet AMD; a metabolic disorder, e.g., a disorder of glucose and lipid homeostasis, e.g., insulin resistance associated with type II diabetes, and a cardiovascular disease.

[0017] Accordingly, in one aspect, the invention provides a double stranded ribonucleic acid (dsRNA) agent for inhibiting expression of transthyretin (TTR) in a cell, wherein the dsRNA agent comprises a sense strand and an antisense strand forming a double stranded region, wherein the sense strand comprises at least 15, e.g., 15, 16, 17, 18, 19, 20, or 21, contiguous nucleotides differing by no more than 3, e.g., 3, 2, 1, or 0, nucleotides from the nucleotide sequence of 5′-AGAGTAUUCCAUUUUUACU-3′ and the antisense strand comprises at least 15, e.g., 15, 16, 17, 18, 19, 20, 21, 22, or 23, contiguous nucleotides differing by no more than 3, e.g., 3, 2, 1, or 0, nucleotides from the nucleotide sequence of 5′-AGUAAAAAUGGAAUACUCUUG-3′, wherein all of the nucleotides of the sense strand and all of the nucleotides of the antisense strand comprise a nucleotide modification selected from the group consisting of a 2′-O-methyl modification and a 2′-fluoro modification; wherein the sense strand comprises at least 2 2′-fluoro modifications; wherein the antisense strand comprises at least 2 2′-fluoro modifications; wherein the sense strand comprises two phosphorothioate linkages; wherein the antisense strand comprises four phosphorothioate linkages; and wherein at least one strand is conjugated to a ligand.

[0018] In one embodiment, the sense strand comprises comprises 2-6 2′-fluoro modifications.

[0019] In one embodiment, the sense strand comprises 4 2′-fluoro modifications.

[0020] In one embodiment, the 4 2′-fluoro modifications are located at positions 7 and 9-11 from the 5′-end of the sense strand.

[0021] In one embodiment, the sense strand comprises 3 2′-fluoro modifications.

[0022] In one embodiment, the 3 2′-fluoro modifications are located at positions 7-9 from the 5′-end of the sense strand.

[0023] In one embodiment, the antisense strand comprises 2-6 2′-fluoro modifications.

[0024] In one embodiment, the antisense strand comprises 4 2′-fluoro modifications.

[0025] In one embodiment, the 4 2′-fluoro modifications are located at positions 2, 6, 14, and 16 from the 5′-end of the antisense strand.

[0026] In one embodiment, the antisense strand comprises 2 2′-fluoro modifications.

[0027] In one embodiment, the 2 2′-fluoro modifications are located at positions 14 and 16 from the 5′-end of the antisense strand.

[0028] In one embodiment, the sense strand comprises two phosphorothioate internucleotide linkages between the 5′ end three terminal nucleotides.

[0029] In one embodiment, the antisense strand comprises two phosphorothioate internucleotide linkages between the 3′-end three terminal nucleotides and two phosphorothioate internucleotide linkages between the 5′ end three terminal nucleotides.

[0030] In one embodiment, the ligand is conjugated to the 3′ end of the sense strand of the dsRNA agent.

[0031] In one embodiment, the ligand is an N-acetylgalactosamine (GalNAc) derivative.

[0032] In one embodiment, the ligand is one or more GalNAc derivatives attached through a monovalent, bivalent, or trivalent branched linker.

[0033] In one embodiment, the ligand is

[chemical structure]

[0034] In one embodiment, the dsRNA agent is conjugated to the ligand as shown in the following schematic

[chemical structure]

and, wherein X is O or S.

[0035] In one embodiment, the X is O.

[0036] In one embodiment, the double stranded region is 19-30 nucleotide pairs in length.

[0037] In one embodiment, the double stranded region is 19-25 nucleotide pairs in length.

[0038] In one embodiment, the double stranded region is 19-23 nucleotide pairs in length.

[0039] In one embodiment, the double stranded region is 23-27 nucleotide pairs in length.

[0040] In one embodiment, the double stranded region is 21-23 nucleotide pairs in length.

[0041] In one embodiment, each strand is independently no more than 30 nucleotides in length.

[0042] In one embodiment, the sense strand is 21 nucleotides in length and the antisense strand is 23 nucleotides in length.

[0043] In one embodiment, at least one strand comprises a 3′ overhang of at least 1 nucleotide.

[0044] In one embodiment, at least one strand comprises a 3′ overhang of at least 2 nucleotides.

[0045] In one embodiment, the sense strand comprises the nucleotide sequence 5′-CAAGAGUAUUCCAUUUUUACU-3′ and the antisense strand comprises the nucleotide sequence 5′-AGUAAAAAUGGAAUACUCUUGGU-3′.

[0046] In one embodiment, the sense strand comprises the nucleotide sequence 5′-CCAAGAGUAUUCCAUUUUUAU-3′ and the antisense strand comprises the nucleotide sequence 5′-AUAAAAAUGGAAUACUCUUGGUU-3′

[0047] In one embodiment, the nucleotide sequence of the sense strand differs by no more than 4 bases form the nucleotide sequence of 5′-csasagagUfaUfUfCfcauuuuuacu-3′ and the nucleotide sequence of the antisense strand differs by no more than 4 bases from the nucleotide sequence of 5′-asGfsuaaAfaauggaaUfaCfucuugsgsu-3′, wherein a, c, g, and u are 2′-O-methyl (2′-OMe) A, C, G, and U; Af, Cf, Gf and Uf are 2′-fluoro A, C, G and U; and s is a phosphorothioate linkage.

[0048] In one embodiment, the nucleotide sequence of the sense strand differs by no more than 3 bases form the nucleotide sequence of 5′-csasagagUfaUfUfCfcauuuuuacu-3′ and the nucleotide sequence of the antisense strand differs by no more than 3 bases from the nucleotide sequence of 5′-asGfsuaaAfaauggaaUfaCfucuugsgsu-3′.

[0049] In one embodiment, the nucleotide sequence of the sense strand differs by no more than 2 bases form the nucleotide sequence of 5′-csasagagUfaUfUfCfcauuuuuacu-3′ and the nucleotide sequence of the antisense strand differs by no more than 2 bases from the nucleotide sequence of 5′-asGfsuaaAfaauggaaUfaCfucuugsgsu-3′.

[0050] In one embodiment, the nucleotide sequence of the sense strand differs by no more than 1 base form the nucleotide sequence of 5′-csasagagUfaUfUfCfcauuuuuacu-3′ and the nucleotide sequence of the antisense strand differs by no more than 1 base from the nucleotide sequence of 5′-asGfsuaaAfaauggaaUfaCfucuugsgsu-3′.

[0051] In one embodiment, the sense strand comprises the nucleotide sequence of 5′-csasagagUfaUfUfCfcauuuuuacu-3′ and the antisense strand comprises the nucleotide sequence of 5′-asGfsuaaAfaauggaaUfaCfucuugsgsu-3′.

[0052] In one embodiment, the sense strand consists of the nucleotide sequence of 5′-csasagagUfaUfUfCfcauuuuuacu-3′ and the antisense strand consists of the nucleotide sequence of 5′-asGfsuaaAfaauggaaUfaCfucuugsgsu-3′.

[0053] In one embodiment, the sense strand comprises the nucleotide sequence of 5′-csasagagUfaUfUfCfcauuuuuacuL96-3′ and the antisense strand comprises the nucleotide sequence of 5′-asGfsuaaAfaauggaaUfaCfucuugsgsu-3′, wherein L96 is N-[tris(GalNAc-alkyl)-amidodecanoyl)]-4-hydroxyprolinol.

[0054] In one embodiment, the dsRNA agent is conjugated to the ligand as shown in the following schematic

[chemical structure]

wherein X is O.

[0055] In one embodiment, the nucleotide sequence of the sense strand differs by no more than 4 bases form the nucleotide sequence of 5′-cscsaagaGfuAfUfUfccauuuuuau-3′ and the nucleotide sequence of the antisense strand differs by no more than 4 bases from the nucleotide sequence of 5′-asUfsaaaAfauggaauAfcUfcuuggsusu-3′, wherein a, c, g, and u are 2′-O-methyl (2′-OMe) A, C, G, and U; Af, Cf, Gf and Uf are 2′-fluoro A, C, G and U; and s is a phosphorothioate linkage.

[0056] In one embodiment, the nucleotide sequence of the sense strand differs by no more than 3 bases form the nucleotide sequence of 5′-cscsaagaGfuAfUfUfccauuuuuau-3′ and the nucleotide sequence of the antisense strand differs by no more than 3 bases from the nucleotide sequence of 5′-asUfsaaaAfauggaauAfcUfcuuggsusu-3′.

[0057] In one embodiment, the nucleotide sequence of the sense strand differs by no more than 2 bases form the nucleotide sequence of 5′-cscsaagaGfuAfUfUfccauuuuuau-3′ and the nucleotide sequence of the antisense strand differs by no more than 2 bases from the nucleotide sequence of 5′-asUfsaaaAfauggaauAfcUfcuuggsusu-3′.

[0058] In one embodiment, the nucleotide sequence of the sense strand differs by no more than 1 base form the nucleotide sequence of 5′-cscsaagaGfuAfUfUfccauuuuuau-3′ and the nucleotide sequence of the antisense strand differs by no more than 1 base from the nucleotide sequence of 5′-asUfsaaaAfauggaauAfcUfcuuggsusu-3′.

[0059] In one embodiment, the sense strand comprises the nucleotide sequence of 5′-cscsaagaGfuAfUfUfccauuuuuau-3′ and the antisense strand comprises the nucleotide sequence of 5′-asUfsaaaAfauggaauAfcUfcuuggsusu-3′.

[0060] In one embodiment, the sense strand consists of the nucleotide sequence of 5′-cscsaagaGfuAfUfUfccauuuuuau-3′ and the antisense strand consists of the nucleotide sequence of 5′-asUfsaaaAfauggaauAfcUfcuuggsusu-3′.

[0061] In one embodiment, the sense strand comprises the nucleotide sequence of 5′-cscsaagaGfuAfUfUfccauuuuuau-3′ and the antisense strand comprises the nucleotide sequence of 5′-asUfsaaaAfauggaauAfcUfcuuggsusu-3′, wherein L96 is N-[tris(GalNAc-alkyl)-amidodecanoyl)]-4-hydroxyprolinol.

[0062] In one embodiment, the dsRNA agent is conjugated to the ligand as shown in the following schematic

[chemical structure]

wherein X is O.

[0063] In one embodiment, the nucleotide sequence of the sense strand differs by no more than 4 bases form the nucleotide sequence of 5′-asgsagdTaUfUfCfcauuuuuacu-3′ and the nucleotide sequence of the antisense strand differs by no more than 4 bases from the nucleotide sequence of 5′-asdGsuadAadAauggaaUfaCfucususg-3′, wherein a, c, g, and u are 2′-O-methyl (2′-OMe) A, C, G, and U; Af, Cf, Gf and Uf are 2′-fluoro A, C, G and U; dT is 2′-deoxythimidine-3′-phosphate; dG is 2′-deoxyguanosine-3′-phosphate; dA is 2′-deoxyadenosine-3′-phosphate; and s is a phosphorothioate linkage.

[0064] In one embodiment, the nucleotide sequence of the sense strand differs by no more than 3 bases form the nucleotide sequence of 5′-asgsagdTaUfUfCfcauuuuuacu-3′ and the nucleotide sequence of the antisense strand differs by no more than 3 bases from the nucleotide sequence of 5′-asdGsuadAadAauggaaUfaCfucususg-3′.

[0065] In one embodiment, the nucleotide sequence of the sense strand differs by no more than 2 bases form the nucleotide sequence of 5′-asgsagdTaUfUfCfcauuuuuacu-3′ and the nucleotide sequence of the antisense strand differs by no more than 2 bases from the nucleotide sequence of 5′-asdGsuadAadAauggaaUfaCfucususg-3′.

[0066] In one embodiment, the nucleotide sequence of the sense strand differs by no more than 1 base form the nucleotide sequence of 5′-asgsagdTaUfUfCfcauuuuuacu-3′ and the nucleotide sequence of the antisense strand differs by no more than 1 base from the nucleotide sequence of 5′-asdGsuadAadAauggaaUfaCfucususg-3′.

[0067] In one embodiment, the sense strand comprises the nucleotide sequence of 5′-asgsagdTaUfUfCfcauuuuuacu-3′ and the nucleotide sequence of the antisense strand comprises the nucleotide sequence of 5′-asdGsuadAadAauggaaUfaCfucususg-3′.

[0068] In one embodiment, the sense strand consists of the nucleotide sequence of 5′-asgsagdTaUfUfCfcauuuuuacu-3′ and the nucleotide sequence of the antisense strand consists of the nucleotide sequence of 5′-asdGsuadAadAauggaaUfaCfucususg-3′.

[0069] In one embodiment, the sense strand comprises the nucleotide sequence of 5′-asgsagdTaUfUfCfcauuuuuacu-3′ and the nucleotide sequence of the antisense strand comprises the nucleotide sequence of 5′-asdGsuadAadAauggaaUfaCfucususg-3′, wherein L96 is N-[tris(GalNAc-alkyl)-amidodecanoyl)]-4-hydroxyprolinol.

[0070] In one embodiment, the dsRNA agent is conjugated to the ligand as shown in the following schematic

[chemical structure]

wherein X is O.

[0071] The present invention also provides cells and pharmaceutical compositions, e.g., comprising a pharmaceutically acceptable carrier, comprising the dsRNA agents of the invention.

[0072] In one embodiment, the pharmaceutical compositions of the invention comprise an unbuffered solution, e.g., saline or water.

[0073] In one embodiment, the pharmaceutical compositions of the invention comprise a buffered solution, e.g., a solution comprising acetate, citrate, prolamine, carbonate, or phosphate or any combination thereof. In one embodiment, the buffer solution is phosphate buffered saline (PBS).

[0074] In one aspect, the present invention provides a method of inhibiting expression of a transthyretin (TTR) gene in a cell. The method includes contacting the cell with a dsRNA agent of the invention, or a pharmaceutical composition of the invention, thereby inhibiting expression of the TTR gene in the cell.

[0075] In one embodiment, the cell is within a subject.

[0076] In one embodiment, the subject is a human.

[0077] In one embodiment, the subject is a subject suffering from a TTR-associated disease.

[0078] In one embodiment, the subject is a subject at risk for developing a TTR-associated disease.

[0079] In one embodiment, the subject carries a TTR gene mutation that is associated with the development of a TTR-associated disease.

[0080] In one embodiment, the TTR-associated disease is selected from the group consisting of senile systemic amyloidosis (SSA), systemic familial amyloidosis, familial amyloidotic polyneuropathy (FAP), familial amyloidotic cardiomyopathy (FAC), leptomeningeal/Central Nervous System (CNS) amyloidosis, hyperthyroxinemia, an ocular disease, e.g., Stargardt's disease, diabetic retinopathy, age-related macular degeneration (AMD), e.g., dry AMD and wet AMD; a metabolic disorder, e.g., a disorder of glucose and lipid homeostasis, e.g., insulin resistance associated with type II diabetes, and a cardiovascular disease.

[0081] In one embodiment, the subject has a TTR-associated amyloidosis and said method reduces an amyloid TTR deposit in said subject.

[0082] In one embodiment, contacting the cell with the dsRNA agent inhibits the expression of TTR by at least 50%, 60%, 70%, 80%, 90%, or 95%.

[0083] In one embodiment, inhibiting expression of TTR decreases TTR protein level in serum of the subject by at least 50%, 60%, 70%, 80%, 90%, or 95%.

[0084] In another aspect, the present invention provides a method of treating a subject suffering from a TTR-associated disease or at risk for developing a TTR-associated disease. The method includes administering to the subject a therapeutically effective amount or a prophylactically effective amount of a double stranded RNAi agent of the invention, or a pharmaceutical composition of the invention, thereby treating said subject.

[0085] In one embodiment, the subject is a human.

[0086] In one embodiment, the subject is a subject suffering from a TTR-associated disease.

[0087] In one embodiment, the subject is a subject at risk for developing a TTR-associated disease.

[0088] In one embodiment, the subject carries a TTR gene mutation that is associated with the development of a TTR-associated disease.

[0089] In one embodiment, the TTR-associated disease is selected from the group consisting of senile systemic amyloidosis (SSA), systemic familial amyloidosis, familial amyloidotic polyneuropathy (FAP), familial amyloidotic cardiomyopathy (FAC), leptomeningeal/Central Nervous System (CNS) amyloidosis, hyperthyroxinemia, an ocular disease, e.g., Stargardt's disease, diabetic retinopathy, age-related macular degeneration (AMD), e.g., dry AMD and wet AMD; a metabolic disorder, e.g., a disorder of glucose and lipid homeostasis, e.g., insulin resistance associated with type II diabetes, and a cardiovascular disease.

[0090] In one embodiment, the subject has a transthyretin-mediated amyloidosis (ATTR amyloidosis) and said method reduces an amyloid TTR deposit in said subject.

[0091] In one embodiment, the ATTR is hereditary ATTR (h-ATTR).

[0092] In one embodiment, the ATTR is non-hereditary ATTR (wt ATTR).

[0093] In one embodiment, administration of the dsRNA agent or pharmaceutical composition to the subject improves at least one indicia of neurological impairment, quality of life, ongoing nerve damage, or cardiovascular impairment in the subject.

[0094] In one embodiment, the double stranded RNAi agent is administered to the human subject by subcutaneous administration or intravenous administration.

[0095] In one embodiment, the subcutaneous administration is self-administration.

[0096] In one embodiment, the self-administration is via a pre-filled syringe or auto-injector syringe.

[0097] In one embodiment, the method further comprises assessing the level of TTR mRNA expression or TTR protein expression in a sample derived from the human subject.

[0098] In one aspect, the present invention provides a kit comprising a dsRNA agent of the invention or a pharmaceutical composition of the invention, and optionally, instructions for use.

[0099] In another aspect, the present invention provides a vial comprising a dsRNA agent of the invention or a pharmaceutical composition of the invention.

[0100] In one aspect, the present invention provides a syringe comprising a dsRNA agent of the invention or a pharmaceutical composition of the invention.

[0101] In one aspect, the present invention provides n RNA-induced silencing complex (RISC) comprising an antisense strand of a dsRNA agent of the invention.

### BRIEF DESCRIPTION OF THE DRAWINGS

[0102] FIG. 1 is a graph showing human TTR mRNA levels in mice (n=3 per group) subcutaneously administered a single 1 mg/kg dose of the indicated dsRNA duplexes, on day 7. Human TTR mRNA levels are shown relative to control levels detected with PBS treatment.

[0103] FIG. 2 is a graph showing the effect of administration of a single subcutaneous 0.5 mg/kg dose of AD-649263, AD-1134938, AD-649264, AD-1134966, or AD-65496 on TTR mRNA levels in non-human primates.

### DETAILED DESCRIPTION OF THE INVENTION

[0104] The present invention provides iRNA compositions which effect the RNA-induced silencing complex (RISC)-mediated cleavage of RNA transcripts of a transthyretin (TTR) gene. The gene may be within a cell, e.g., a cell within a subject, such as a human. The use of these iRNAs enables the targeted degradation of mRNAs of the corresponding gene (TTR) in mammals.

[0105] The iRNAs of the invention have been designed to target the human transthyretin (TTR) gene, including portions of the gene that are conserved in the TTR orthologs of other mammalian species. Without intending to be limited by theory, it is believed that a combination of the specific target sites, the specific modifications and the attachment to a ligand in these iRNAs confer to the iRNAs of the invention improved efficacy, stability, potency, durability, and safety. Another unexpected and highly desirable feature of the iRNAs of the invention is that they exhibit no, or very low, off target activity. In the Examples presented herein the inventors have identified dsRNA agents of the invention which exhibit the least observed off-target activity of any dsRNA agent targeting any gene to date.

[0106] The present invention also provides methods for treating and preventing a transthyretin (TTR)-associated disorder, e.g., senile systemic amyloidosis (SSA), systemic familial amyloidosis, familial amyloidotic polyneuropathy (FAP), familial amyloidotic cardiomyopathy (FAC), leptomeningeal/Central Nervous System (CNS) amyloidosis, hyperthyroxinemia, an ocular disease, e.g., Stargardt's disease, diabetic retinopathy, age-related macular degeneration (AMD), e.g., dry AMD and wet AMD; a metabolic disorder, e.g., a disorder of glucose and lipid homeostasis, e.g., insulin resistance associated with type II diabetes, or a cardiovascular disease, using iRNA compositions which effect the RNA-induced silencing complex (RISC)-mediated cleavage of RNA transcripts of an TTR gene.

[0107] The iRNAs of the invention include an RNA strand (the antisense strand) having a region which is up to about 30 nucleotides or less in length, e.g., 19-30, 19-29, 19-28, 19-27, 19-26, 19-25, 19-24, 19-23, 19-22, 19-21, 19-20, 20-30, 20-29, 20-28, 20-27, 20-26, 20-25, 20-24,20-23, 20-22, 20-21, 21-30, 21-29, 21-28, 21-27, 21-26, 21-25, 21-24, 21-23, or 21-22 nucleotides in length, which region is substantially complementary to at least part of an mRNA transcript of an TTR gene.

[0108] In certain embodiments, one or both of the strands of the double stranded RNAi agents of the invention is up to 66 nucleotides in length, e.g., 36-66, 26-36, 25-36, 31-60, 22-43, 27-53 nucleotides in length, with a region of at least 19 contiguous nucleotides that is substantially complementary to at least a part of an mRNA transcript of an TTR gene. In some embodiments, such iRNA agents having longer length antisense strands may, for example, include a second RNA strand (the sense strand) of 20-60 nucleotides in length wherein the sense and antisense strands form a duplex of 18-30 contiguous nucleotides.

[0109] The use of iRNAs of the invention enables the targeted degradation of mRNAs of the corresponding gene (TTR gene) in mammals. Using in vitro assays, the present inventors have demonstrated that iRNAs targeting an TTR gene can potently mediate RNAi, resulting in significant inhibition of expression of an TTR gene. Thus, methods and compositions including these iRNAs are useful for treating a subject having an TTR-associated disorder, e.g., senile systemic amyloidosis (SSA), systemic familial amyloidosis, familial amyloidotic polyneuropathy (FAP), familial amyloidotic cardiomyopathy (FAC), leptomeningeal/Central Nervous System (CNS) amyloidosis, hyperthyroxinemia, an ocular disease, e.g., Stargardt's disease, diabetic retinopathy, age-related macular degeneration (AMD), e.g., dry AMD and wet AMD; a metabolic disorder, e.g., a disorder of glucose and lipid homeostasis, e.g., insulin resistance associated with type II diabetes, or a cardiovascular disease.

[0110] Accordingly, the present invention provides methods and combination therapies for treating a subject having a disorder that would benefit from inhibiting or reducing the expression of an TTR gene, e.g., a transthyretin (TTR)-associated disorder, such as, senile systemic amyloidosis (SSA), systemic familial amyloidosis, familial amyloidotic polyneuropathy (FAP), familial amyloidotic cardiomyopathy (FAC), leptomeningeal/Central Nervous System (CNS) amyloidosis, hyperthyroxinemia, an ocular disease, e.g., Stargardt's disease, diabetic retinopathy, age-related macular degeneration (AMD), e.g., dry AMD and wet AMD; a metabolic disorder, e.g., a disorder of glucose and lipid homeostasis, e.g., insulin resistance associated with type II diabetes, and a cardiovascular disease, using iRNA compositions which effect the RNA-induced silencing complex (RISC)-mediated cleavage of RNA transcripts of an TTR gene.

[0111] The present invention also provides methods for preventing at least one symptom in a subject having a disorder that would benefit from inhibiting or reducing the expression of an TTR gene, e.g., a transthyretin (TTR)-associated disorder, such as senile systemic amyloidosis (SSA), systemic familial amyloidosis, familial amyloidotic polyneuropathy (FAP), familial amyloidotic cardiomyopathy (FAC), leptomeningeal/Central Nervous System (CNS) amyloidosis, hyperthyroxinemia, an ocular disease, e.g., Stargardt's disease, diabetic retinopathy, age-related macular degeneration (AMD), e.g., dry AMD and wet AMD; a metabolic disorder, e.g., a disorder of glucose and lipid homeostasis, e.g., insulin resistance associated with type II diabetes, and a cardiovascular disease.

[0112] The following detailed description discloses how to make and use compositions containing iRNAs to inhibit the expression of an TTR gene as well as compositions, uses, and methods for treating subjects that would benefit from inhibition and/or reduction of the expression of an TTR gene, e.g., subjects susceptible to or diagnosed with an TTR-associated disorder.

### I. Definitions

[0113] In order that the present invention may be more readily understood, certain terms are first defined. In addition, it should be noted that whenever a value or range of values of a parameter are recited, it is intended that values and ranges intermediate to the recited values are also intended to be part of this invention.

[0114] The articles “a” and “an” are used herein to refer to one or to more than one (i.e., to at least one) of the grammatical object of the article. By way of example, “an element” means one element or more than one element, e.g., a plurality of elements.

[0115] The term “including” is used herein to mean, and is used interchangeably with, the phrase “including but not limited to”.

[0116] The term “or” is used herein to mean, and is used interchangeably with, the term “and/or,” unless context clearly indicates otherwise. For example, “sense strand or antisense strand” is understood as “sense strand or antisense strand or sense strand and antisense strand.”

[0117] The term “about” is used herein to mean within the typical ranges of tolerances in the art. For example, “about” can be understood as about 2 standard deviations from the mean. In certain embodiments, about means±10%. In certain embodiments, about means±5%. When about is present before a series of numbers or a range, it is understood that “about” can modify each of the numbers in the series or range.

[0118] The term “at least”, “no less than”, or “or more” prior to a number or series of numbers is understood to include the number adjacent to the term “at least”, and all subsequent numbers or integers that could logically be included, as clear from context. For example, the number of nucleotides in a nucleic acid molecule must be an integer. For example, “at least 19 nucleotides of a 21 nucleotide nucleic acid molecule” means that 19, 20, or 21 nucleotides have the indicated property. When at least is present before a series of numbers or a range, it is understood that “at least” can modify each of the numbers in the series or range.

[0119] As used herein, “no more than” or “or less” is understood as the value adjacent to the phrase and logical lower values or integers, as logical from context, to zero. For example, a duplex with an overhang of “no more than 2 nucleotides” has a 2, 1, or 0 nucleotide overhang. When “no more than” is present before a series of numbers or a range, it is understood that “no more than” can modify each of the numbers in the series or range. As used herein, ranges include both the upper and lower limit.

[0120] As used herein, methods of detection can include determination that the amount of analyte present is below the level of detection of the method.

[0121] In the event of a conflict between an indicated target site and the nucleotide sequence for a sense or antisense strand, the indicated sequence takes precedence.

[0122] In the event of a conflict between a sequence and its indicated site on a transcript or other sequence, the nucleotide sequence recited in the specification takes precedence.

[0123] As used herein, “transthyretin” (“TTR”) refers to the well-known gene and protein. TTR is also known as prealbumin, HsT2651, PALB, and TBPA. TTR functions as a transporter of retinol-binding protein (RBP), thyroxine (T4) and retinol, and it also acts as a protease. The liver secretes TTR into the blood, and the choroid plexus secretes TTR into the cerebrospinal fluid. TTR is also expressed in the pancreas and the retinal pigment epithelium. The greatest clinical relevance of TTR is that both normal (wild type) and mutant TTR protein can form amyloid fibrils that aggregate into extracellular deposits, causing amyloidosis. See, e.g., Saraiva M. J. M. (2002) Expert Reviews in Molecular Medicine, 4(12):1-11 for a review. The molecular cloning and nucleotide sequence of rat transthyretin, as well as the distribution of mRNA expression, was described by Dickson, P. W. et al. (1985) J. Biol. Chem. 260(13)8214-8219. The X-ray crystal structure of human TTR was described in Blake, C. C. et al. (1974) J Mol Biol 88, 1-12.

[0124] The sequence of a human TTR mRNA transcript may be found at National Center for Biotechnology Information (NCBI) RefSeq accession number NM_000371.4 (SEQ ID NO:1; reverse complement, SEQ ID NO:5). The sequence of mouse TTR mRNA may be found at RefSeq accession number NM_013697.2 (SEQ ID NO:2; reverse complement, SEQ ID NO:6). The sequence of rat TTR mRNA may be found at RefSeq accession number NM_012681.1 (SEQ ID NO:3; reverse complement, SEQ ID NO:7). The sequence of Macaca fascicularis TTR mRNA may be found at RefSeq accession number NM_001283593.1 (SEQ ID NO:4; reverse complement, SEQ ID NO:8). The sequence of Macaca mulatta TTR mRNA may be found at RefSeq accession number NM_001261679.1 (SEQ ID NO:9; reverse complement, SEQ ID NO:10).

[0125] Additional examples of TTR mRNA sequences are readily available through publicly available databases, e.g., GenBank, UniProt, OMIM, and the Macaca genome project web site.

[0126] Further information on TTR can be found, for example, at www.ncbi.nlm.nih.gov/gene/?term=TTR.

[0127] The entire contents of each of the foregoing GenBank Accession numbers and the Gene database numbers are incorporated herein by reference as of the date of filing this application.

[0128] The term TTR, as used herein, also refers to variations of the TTR gene including variants provided in the SNP database. Numerous sequence variations within the TTR gene have been identified and may be found at, for example, NCBI dbSNP and UniProt (see, e.g., www.ncbi.nlm.nih.gov/snp/?term=TTR, the entire contents of which is incorporated herein by reference as of the date of filing this application.

[0129] As used herein, “target sequence” refers to a contiguous portion of the nucleotide sequence of an mRNA molecule formed during the transcription of an TTR gene, including mRNA that is a product of RNA processing of a primary transcription product. In one embodiment, the target portion of the sequence will be at least long enough to serve as a substrate for iRNA-directed cleavage at or near that portion of the nucleotide sequence of an mRNA molecule formed during the transcription of a TTR gene.

[0130] The target sequence may be from about 19-36 nucleotides in length, e.g., about 19-30 nucleotides in length. For example, the target sequence can be about 19-30 nucleotides, 19-30, 19-29, 19-28, 19-27, 19-26, 19-25, 19-24, 19-23, 19-22, 19-21, 19-20, 20-30, 20-29, 20-28, 20-27, 20-26, 20-25, 20-24, 20-23, 20-22, 20-21, 21-30, 21-29, 21-28, 21-27, 21-26, 21-25, 21-24, 21-23, or 21-22 nucleotides in length. In certain embodiments, the target sequence is 19-23 nucleotides in length, optionally 21-23 nucleotides in length. Ranges and lengths intermediate to the above recited ranges and lengths are also contemplated to be part of the disclosure.

[0131] As used herein, the term “strand comprising a sequence” refers to an oligonucleotide comprising a chain of nucleotides that is described by the sequence referred to using the standard nucleotide nomenclature.

[0132] “G,” “C,” “A,” “T,” and “U” each generally stand for a nucleotide that contains guanine, cytosine, adenine, thymidine, and uracil as a base, respectively. However, it will be understood that the term “ribonucleotide” or “nucleotide” can also refer to a modified nucleotide, as further detailed below, or a surrogate replacement moiety (see, e.g., Table 1). The skilled person is well aware that guanine, cytosine, adenine, and uracil can be replaced by other moieties without substantially altering the base pairing properties of an oligonucleotide comprising a nucleotide bearing such replacement moiety. For example, without limitation, a nucleotide comprising inosine as its base can base pair with nucleotides containing adenine, cytosine, or uracil. Hence, nucleotides containing uracil, guanine, or adenine can be replaced in the nucleotide sequences of dsRNA featured in the invention by a nucleotide containing, for example, inosine. In another example, adenine and cytosine anywhere in the oligonucleotide can be replaced with guanine and uracil, respectively to form G-U Wobble base pairing with the target mRNA. Sequences containing such replacement moieties are suitable for the compositions and methods featured in the invention.

[0133] The terms “iRNA”, “RNAi agent,” “iRNA agent,”, “RNA interference agent” as used interchangeably herein, refer to an agent that contains RNA as that term is defined herein, and which mediates the targeted cleavage of an RNA transcript via an RNA-induced silencing complex (RISC) pathway. iRNA directs the sequence-specific degradation of mRNA through a process known as RNA interference (RNAi). The iRNA modulates, e.g., inhibits, the expression of an TTR gene in a cell, e.g., a liver cell within a subject, such as a mammalian subject.

[0134] In one embodiment, an RNAi agent of the invention includes a single stranded RNA that interacts with a target RNA sequence, e.g., an TTR target mRNA sequence, to direct the cleavage of the target RNA. Without wishing to be bound by theory it is believed that long double stranded RNA introduced into cells is broken down into siRNA by a Type III endonuclease known as Dicer (Sharp et al. (2001) Genes Dev. 15:485). Dicer, a ribonuclease-III-like enzyme, processes the dsRNA into 19-23 base pair short interfering RNAs with characteristic two base 3′ overhangs (Bernstein, et al., (2001) Nature 409:363). The siRNAs are then incorporated into an RNA-induced silencing complex (RISC) where one or more helicases unwind the siRNA duplex, enabling the complementary antisense strand to guide target recognition (Nykanen, et al., (2001) Cell 107:309). Upon binding to the appropriate target mRNA, one or more endonucleases within the RISC cleave the target to induce silencing (Elbashir, et al., (2001) Genes Dev. 15:188). Thus, in one aspect the invention relates to a single stranded RNA (siRNA) generated within a cell and which promotes the formation of a RISC complex to effect silencing of the target gene, i.e., an TTR gene. Accordingly, the term “siRNA” is also used herein to refer to an iRNA as described above.

[0135] In certain embodiments, the RNAi agent may be a single-stranded siRNA (ssRNAi) that is introduced into a cell or organism to inhibit a target mRNA. Single-stranded RNAi agents bind to the RISC endonuclease, Argonaute 2, which then cleaves the target mRNA. The single-stranded siRNAs are generally 15-30 nucleotides and are chemically modified. The design and testing of single-stranded siRNAs are described in U.S. Pat. No. 8,101,348 and in Lima et al., (2012) Cell 150:883-894, the entire contents of each of which are hereby incorporated herein by reference. Any of the antisense nucleotide sequences described herein may be used as a single-stranded siRNA as described herein or as chemically modified by the methods described in Lima et al., (2012) Cell 150:883-894.

[0136] In certain embodiments, an “iRNA” for use in the compositions, uses, and methods of the invention is a double stranded RNA and is referred to herein as a “double stranded RNA agent,” “double stranded RNA (dsRNA) molecule,” “dsRNA agent,” or “dsRNA”. The term “dsRNA”, refers to a complex of ribonucleic acid molecules, having a duplex structure comprising two anti-parallel and substantially complementary nucleic acid strands, referred to as having “sense” and “antisense” orientations with respect to a target RNA, i.e., an TTR gene. In some embodiments of the invention, a double stranded RNA (dsRNA) triggers the degradation of a target RNA, e.g., an mRNA, through a post-transcriptional gene-silencing mechanism referred to herein as RNA interference or RNAi.

[0137] In general, the majority of nucleotides of each strand of a dsRNA molecule are ribonucleotides, but as described in detail herein, each or both strands can also include one or more non-ribonucleotides, e.g., a deoxyribonucleotide or a modified nucleotide. In addition, as used in this specification, an “iRNA” may include ribonucleotides with chemical modifications; an iRNA may include substantial modifications at multiple nucleotides. As used herein, the term “modified nucleotide” refers to a nucleotide having, independently, a modified sugar moiety, a modified internucleotide linkage, or modified nucleobase, or any combination thereof. Thus, the term modified nucleotide encompasses substitutions, additions or removal of, e.g., a functional group or atom, to internucleoside linkages, sugar moieties, or nucleobases. The modifications suitable for use in the agents of the invention include all types of modifications disclosed herein or known in the art. Any such modifications, as used in a siRNA type molecule, are encompassed by “iRNA” or “RNAi agent” for the purposes of this specification and claims.

[0138] In certain embodiments of the instant disclosure, inclusion of a deoxy-nucleotide if present within an RNAi agent can be considered to constitute a modified nucleotide.

[0139] The duplex region may be of any length that permits specific degradation of a desired target RNA through a RISC pathway, and may range from about 19 to 36 base pairs in length, e.g., about 19-30 base pairs in length, for example, about 9, 10, 11, 12, 13, 14, 15, 16, 17, 18, 19, 20, 21, 22, 23, 24, 25, 26, 27, 28, 29, 30, 31, 32, 33, 34, 35, or 36 base pairs in length, such as about 19-30, 19-29, 19-28, 19-27, 19-26, 19-25, 19-24, 19-23, 19-22, 19-21, 19-20, 20-30, 20-29, 20-28, 20-27, 20-26, 20-25, 20-24, 20-23, 20-22, 20-21, 21-30, 21-29, 21-28, 21-27, 21-26, 21-25, 21-24, 21-23, or 21-22 base pairs in length. In certain embodiments, the duplex region is 19-21 base pairs in length, e.g., 21 base pairs in length. Ranges and lengths intermediate to the above recited ranges and lengths are also contemplated to be part of the disclosure.

[0140] The two strands forming the duplex structure may be different portions of one larger RNA molecule, or they may be separate RNA molecules. Where the two strands are part of one larger molecule, and therefore are connected by an uninterrupted chain of nucleotides between the 3′-end of one strand and the 5′-end of the respective other strand forming the duplex structure, the connecting RNA chain is referred to as a “hairpin loop.” A hairpin loop can comprise at least one unpaired nucleotide. In some embodiments, the hairpin loop can comprise at least 2, 3, 4, 5, 6, 7, 8, 9, 10, 20, 23 or more unpaired nucleotides. In some embodiments, the hairpin loop can be 10 or fewer nucleotides. In some embodiments, the hairpin loop can be 8 or fewer unpaired nucleotides. In some embodiments, the hairpin loop can be 4-10 unpaired nucleotides. In some embodiments, the hairpin loop can be 4-8 nucleotides.

[0141] Where the two substantially complementary strands of a dsRNA are comprised by separate RNA molecules, those molecules need not be, but can be covalently connected. Where the two strands are connected covalently by means other than an uninterrupted chain of nucleotides between the 3′-end of one strand and the 5′-end of the respective other strand forming the duplex structure, the connecting structure is referred to as a “linker.” The RNA strands may have the same or a different number of nucleotides. The maximum number of base pairs is the number of nucleotides in the shortest strand of the dsRNA minus any overhangs that are present in the duplex. In addition to the duplex structure, an RNAi may comprise one or more nucleotide overhangs. In one embodiment of the RNAi agent, at least one strand comprises a 3′ overhang of at least 1 nucleotide. In another embodiment, at least one strand comprises a 3′ overhang of at least 2 nucleotides, e.g., 2, 3, 4, 5, 6, 7, 9, 10, 11, 12, 13, 14, or 15 nucleotides. In other embodiments, at least one strand of the RNAi agent comprises a 5′ overhang of at least 1 nucleotide. In certain embodiments, at least one strand comprises a 5′ overhang of at least 2 nucleotides, e.g., 2, 3, 4, 5, 6, 7, 9, 10, 11, 12, 13, 14, or 15 nucleotides. In still other embodiments, both the 3′ and the 5′ end of one strand of the RNAi agent comprise an overhang of at least 1 nucleotide.

[0142] In certain embodiments, an iRNA agent of the invention is a dsRNA, each strand of which comprises 19-23 nucleotides, that interacts with a target RNA sequence, e.g., an TTR gene, to direct cleavage of the target RNA.

[0143] In some embodiments, an iRNA of the invention is a dsRNA of 24-30 nucleotides that interacts with a target RNA sequence, e.g., an TTR target mRNA sequence, to direct the cleavage of the target RNA.

[0144] As used herein, the term “nucleotide overhang” refers to at least one unpaired nucleotide that protrudes from the duplex structure of a double stranded iRNA. For example, when a 3′-end of one strand of a dsRNA extends beyond the 5′-end of the other strand, or vice versa, there is a nucleotide overhang. A dsRNA can comprise an overhang of at least one nucleotide; alternatively the overhang can comprise at least two nucleotides, at least three nucleotides, at least four nucleotides, at least five nucleotides or more. A nucleotide overhang can comprise or consist of a nucleotide/nucleoside analog, including a deoxynucleotide/nucleoside. The overhang(s) can be on the sense strand, the antisense strand, or any combination thereof. Furthermore, the nucleotide(s) of an overhang can be present on the 5′-end, 3′-end, or both ends of either an antisense or sense strand of a dsRNA.

[0145] In one embodiment, the antisense strand of a dsRNA has a 1-10 nucleotide, e.g., a 1, 2, 3, 4, 5, 6, 7, 8, 9, or 10 nucleotide, overhang at the 3′-end or the 5′-end. In one embodiment, the sense strand of a dsRNA has a 1-10 nucleotide, e.g., a 1, 2, 3, 4, 5, 6, 7, 8, 9, or 10 nucleotide, overhang at the 3′-end or the 5′-end. In another embodiment, one or more of the nucleotides in the overhang is replaced with a nucleoside thiophosphate.

[0146] In certain embodiments, the antisense strand of a dsRNA has a 1-10 nucleotide, e.g., 0-3, 1-3, 2-4, 2-5, 4-10, 5-10, e.g., a 1, 2, 3, 4, 5, 6, 7, 8, 9, or 10 nucleotide, overhang at the 3′-end or the 5′-end. In one embodiment, the sense strand of a dsRNA has a 1-10 nucleotide, e.g., a 1, 2, 3, 4, 5, 6, 7, 8, 9, or 10 nucleotide, overhang at the 3′-end or the 5′-end. In another embodiment, one or more of the nucleotides in the overhang is replaced with a nucleoside thiophosphate.

[0147] In certain embodiments, the antisense strand of a dsRNA has a 1-10 nucleotides, e.g., a 1, 2, 3, 4, 5, 6, 7, 8, 9, or 10 nucleotide, overhang at the 3′-end or the 5′-end. In certain embodiments, the overhang on the sense strand or the antisense strand, or both, can include extended lengths longer than 10 nucleotides, e.g., 1-30 nucleotides, 2-30 nucleotides, 10-30 nucleotides, 10-25 nucleotides, 10-20 nucleotides, or 10-15 nucleotides in length. In certain embodiments, an extended overhang is on the sense strand of the duplex. In certain embodiments, an extended overhang is present on the 3′ end of the sense strand of the duplex. In certain embodiments, an extended overhang is present on the 5′ end of the sense strand of the duplex. In certain embodiments, an extended overhang is on the antisense strand of the duplex. In certain embodiments, an extended overhang is present on the 3′end of the antisense strand of the duplex. In certain embodiments, an extended overhang is present on the 5′end of the antisense strand of the duplex. In certain embodiments, one or more of the nucleotides in the extended overhang is replaced with a nucleoside thiophosphate. In certain embodiments, the overhang includes a self-complementary portion such that the overhang is capable of forming a hairpin structure that is stable under physiological conditions.

[0148] “Blunt” or “blunt end” means that there are no unpaired nucleotides at that end of the double stranded RNA agent, i.e., no nucleotide overhang. A “blunt ended” double stranded RNA agent is double stranded over its entire length, i.e., no nucleotide overhang at either end of the molecule. The RNAi agents of the invention include RNAi agents with no nucleotide overhang at one end (i.e., agents with one overhang and one blunt end) or with no nucleotide overhangs at either end. Most often such a molecule will be double-stranded over its entire length.

[0149] The term “antisense strand” or “guide strand” refers to the strand of an iRNA, e.g., a dsRNA, which includes a region that is substantially complementary to a target sequence, e.g., an TTR mRNA.

[0150] As used herein, the term “region of complementarity” refers to the region on the antisense strand that is substantially complementary to a sequence, for example a target sequence, e.g., an TTR nucleotide sequence, as defined herein. Where the region of complementarity is not fully complementary to the target sequence, the mismatches can be in the internal or terminal regions of the molecule. Generally, the most tolerated mismatches are in the terminal regions, e.g., within 5, 4, or 3 nucleotides of the 5′- or 3′-end of the iRNA. In some embodiments, a double stranded RNA agent of the invention includes a nucleotide mismatch in the antisense strand. In some embodiments, the antisense strand of the double stranded RNA agent of the invention includes no more than 4 mismatches with the target mRNA, e.g., the antisense strand includes 4, 3, 2, 1, or 0 mismatches with the target mRNA. In some embodiments, the antisense strand double stranded RNA agent of the invention includes no more than 4 mismatches with the sense strand, e.g., the antisense strand includes 4, 3, 2, 1, or 0 mismatches with the sense strand. In some embodiments, a double stranded RNA agent of the invention includes a nucleotide mismatch in the sense strand. In some embodiments, the sense strand of the double stranded RNA agent of the invention includes no more than 4 mismatches with the antisense strand, e.g., the sense strand includes 4, 3, 2, 1, or 0 mismatches with the antisense strand. In some embodiments, the nucleotide mismatch is, for example, within 5, 4, 3 nucleotides from the 3′-end of the iRNA. In another embodiment, the nucleotide mismatch is, for example, in the 3′-terminal nucleotide of the iRNA agent. In some embodiments, the mismatch(s) is not in the seed region.

[0151] Thus, an RNAi agent as described herein can contain one or more mismatches to the target sequence. In one embodiment, an RNAi agent as described herein contains no more than 3 mismatches (i.e., 3, 2, 1, or 0 mismatches). In one embodiment, an RNAi agent as described herein contains no more than 2 mismatches. In one embodiment, an RNAi agent as described herein contains no more than 1 mismatch. In one embodiment, an RNAi agent as described herein contains 0 mismatches. In certain embodiments, if the antisense strand of the RNAi agent contains mismatches to the target sequence, the mismatch can optionally be restricted to be within the last 5 nucleotides from either the 5′- or 3′-end of the region of complementarity. For example, in such embodiments, for a 23 nucleotide RNAi agent, the strand which is complementary to a region of an TTR gene, generally does not contain any mismatch within the central 13 nucleotides. The methods described herein or methods known in the art can be used to determine whether an RNAi agent containing a mismatch to a target sequence is effective in inhibiting the expression of an TTR gene. Consideration of the efficacy of RNAi agents with mismatches in inhibiting expression of an TTR gene is important, especially if the particular region of complementarity in an TTR gene is known to have polymorphic sequence variation within the population.

[0152] The term “sense strand” or “passenger strand” as used herein, refers to the strand of an iRNA that includes a region that is substantially complementary to a region of the antisense strand as that term is defined herein.

[0153] As used herein, “substantially all of the nucleotides are modified” are largely but not wholly modified and can include not more than 5, 4, 3, 2, or 1 unmodified nucleotides.

[0154] As used herein, the term “cleavage region” refers to a region that is located immediately adjacent to the cleavage site. The cleavage site is the site on the target at which cleavage occurs. In some embodiments, the cleavage region comprises three bases on either end of, and immediately adjacent to, the cleavage site. In some embodiments, the cleavage region comprises two bases on either end of, and immediately adjacent to, the cleavage site. In some embodiments, the cleavage site specifically occurs at the site bound by nucleotides 10 and 11 of the antisense strand, and the cleavage region comprises nucleotides 11, 12 and 13.

[0155] As used herein, and unless otherwise indicated, the term “complementary,” when used to describe a first nucleotide sequence in relation to a second nucleotide sequence, refers to the ability of an oligonucleotide or polynucleotide comprising the first nucleotide sequence to hybridize and form a duplex structure under certain conditions with an oligonucleotide or polynucleotide comprising the second nucleotide sequence, as will be understood by the skilled person. Such conditions can, for example, be stringent conditions, where stringent conditions can include: 400 mM NaCl, 40 mM PIPES pH 6.4, 1 mM EDTA, 50° C. or 70° C. for 12-16 hours followed by washing (see, e.g., “Molecular Cloning: A Laboratory Manual, Sambrook, et al. (1989) Cold Spring Harbor Laboratory Press). Other conditions, such as physiologically relevant conditions as can be encountered inside an organism, can apply. The skilled person will be able to determine the set of conditions most appropriate for a test of complementarity of two sequences in accordance with the ultimate application of the hybridized nucleotides.

[0156] Complementary sequences within an iRNA, e.g., within a dsRNA as described herein, include base-pairing of the oligonucleotide or polynucleotide comprising a first nucleotide sequence to an oligonucleotide or polynucleotide comprising a second nucleotide sequence over the entire length of one or both nucleotide sequences. Such sequences can be referred to as “fully complementary” with respect to each other herein. However, where a first sequence is referred to as “substantially complementary” with respect to a second sequence herein, the two sequences can be fully complementary, or they can form one or more, but generally not more than 5, 4, 3, or 2 mismatched base pairs upon hybridization for a duplex up to 30 base pairs, while retaining the ability to hybridize under the conditions most relevant to their ultimate application, e.g., inhibition of gene expression, in vitro or in vivo. However, where two oligonucleotides are designed to form, upon hybridization, one or more single stranded overhangs, such overhangs shall not be regarded as mismatches with regard to the determination of complementarity. For example, a dsRNA comprising one oligonucleotide 21 nucleotides in length and another oligonucleotide 23 nucleotides in length, wherein the longer oligonucleotide comprises a sequence of 21 nucleotides that is fully complementary to the shorter oligonucleotide, can yet be referred to as “fully complementary” for the purposes described herein.

[0157] “Complementary” sequences, as used herein, can also include, or be formed entirely from, non-Watson-Crick base pairs or base pairs formed from non-natural and modified nucleotides, in so far as the above requirements with respect to their ability to hybridize are fulfilled. Such non-Watson-Crick base pairs include, but are not limited to, G:U Wobble or Hoogsteen base pairing.

[0158] The terms “complementary,” “fully complementary” and “substantially complementary” herein can be used with respect to the base matching between the sense strand and the antisense strand of a dsRNA, or between two oligonucleotides or polynucleotides, such as the antisense strand of a double stranded RNA agent and a target sequence, as will be understood from the context of their use.

[0159] As used herein, a polynucleotide that is “substantially complementary to at least part of” a messenger RNA (mRNA) refers to a polynucleotide that is substantially complementary to a contiguous portion of the mRNA of interest (e.g., an mRNA encoding an TTR gene). For example, a polynucleotide is complementary to at least a part of an TTR mRNA if the sequence is substantially complementary to a non-interrupted portion of an mRNA encoding an TTR gene.

[0160] Accordingly, in some embodiments, the antisense polynucleotides disclosed herein are fully complementary to the target TTR sequence. In other embodiments, the antisense polynucleotides disclosed herein are substantially complementary to the target TTR sequence and comprise a contiguous nucleotide sequence which is at least 80% complementary over its entire length to the equivalent region of the nucleotide sequence of any one of SEQ ID NOs:1, 3, 5, 7, or 9, or a fragment of any one of SEQ ID NOs:1, 3, 5, 7, or 9, such as about 85%, about 90%, about 91%, about 92%, about 93%, about 94%, about 95%, about 96%, about 97%, about 98%, or about 99% complementary.

[0161] In other embodiments, the antisense polynucleotides disclosed herein are substantially complementary to the target TTR sequence and comprise a contiguous nucleotide sequence which is at least about 80% complementary over its entire length to any one of the sense strand nucleotide sequences in any one of any one of Tables 2, 3, 5, and 6, or a fragment of any one of the sense strand nucleotide sequences in any one of Tables 2, 3, 5, and 6, such as about 85%, about 90%, about 91%, about 92%, about 93%, about 94%, about 95%, about 96%, about 97%, about 98%, about 99%, or 100% complementary.

[0162] In one embodiment, an RNAi agent of the disclosure includes a sense strand that is substantially complementary to an antisense polynucleotide which, in turn, is the same as a target TTR sequence, and wherein the sense strand polynucleotide comprises a contiguous nucleotide sequence which is at least about 80% complementary over its entire length to the equivalent region of the nucleotide sequence of SEQ ID NOs: 2, 4, 6, 8, or 10, or a fragment of any one of SEQ ID NOs:2, 4, 6, 8, or 10, such as about 85%, about 90%, about 91%, about 92%, about 93%, about 94%, about 95%, about 96%, about 97%, about 98%, about 99%, or 100% complementary.

[0163] In some embodiments, an iRNA of the invention includes a sense strand that is substantially complementary to an antisense polynucleotide which, in turn, is complementary to a target TTR sequence, and wherein the sense strand polynucleotide comprises a contiguous nucleotide sequence which is at least about 80% complementary over its entire length to any one of the antisense strand nucleotide sequences in any one of any one of Tables 2, 3, 5, and 6, or a fragment of any one of the antisense strand nucleotide sequences in any one of Tables 2, 3, 5, and 6, such as about 85%, about 90%, about 91%, about 92%, about 93%, about 94%, about 95%, about 96%, about 97%, about 98%, about 99%, or 100% complementary.

[0164] In general, an “iRNA” includes ribonucleotides with chemical modifications. Such modifications may include all types of modifications disclosed herein or known in the art. Any such modifications, as used in a dsRNA molecule, are encompassed by “iRNA” for the purposes of this specification and claims.

[0165] In certain embodiments of the instant disclosure, inclusion of a deoxy-nucleotide if present within an RNAi agent can be considered to constitute a modified nucleotide.

[0166] In an aspect of the invention, an agent for use in the methods and compositions of the invention is a single-stranded antisense oligonucleotide molecule that inhibits a target mRNA via an antisense inhibition mechanism. The single-stranded antisense oligonucleotide molecule is complementary to a sequence within the target mRNA. The single-stranded antisense oligonucleotides can inhibit translation in a stoichiometric manner by base pairing to the mRNA and physically obstructing the translation machinery, see Dias, N. et al., (2002) Mol Cancer Ther 1:347-355. The single-stranded antisense oligonucleotide molecule may be about 14 to about 30 nucleotides in length and have a sequence that is complementary to a target sequence. For example, the single-stranded antisense oligonucleotide molecule may comprise a sequence that is at least about 14, 15, 16, 17, 18, 19, 20, or more contiguous nucleotides from any one of the antisense sequences described herein.

[0167] The phrase “contacting a cell with an iRNA,” such as a dsRNA, as used herein, includes contacting a cell by any possible means. Contacting a cell with an iRNA includes contacting a cell in vitro with the iRNA or contacting a cell in vivo with the iRNA. The contacting may be done directly or indirectly. Thus, for example, the iRNA may be put into physical contact with the cell by the individual performing the method, or alternatively, the iRNA may be put into a situation that will permit or cause it to subsequently come into contact with the cell.

[0168] Contacting a cell in vitro may be done, for example, by incubating the cell with the iRNA. Contacting a cell in vivo may be done, for example, by injecting the iRNA into or near the tissue where the cell is located, or by injecting the iRNA into another area, e.g., the bloodstream or the subcutaneous space, such that the agent will subsequently reach the tissue where the cell to be contacted is located. For example, the iRNA may contain or be coupled to a ligand, e.g., GalNAc, that directs the iRNA to a site of interest, e.g., the liver. Combinations of in vitro and in vivo methods of contacting are also possible. For example, a cell may also be contacted in vitro with an iRNA and subsequently transplanted into a subject.

[0169] In certain embodiments, contacting a cell with an iRNA includes “introducing” or “delivering the iRNA into the cell” by facilitating or effecting uptake or absorption into the cell. Absorption or uptake of an iRNA can occur through unaided diffusion or active cellular processes, or by auxiliary agents or devices. Introducing an iRNA into a cell may be in vitro or in vivo. For example, for in vivo introduction, iRNA can be injected into a tissue site or administered systemically. In vitro introduction into a cell includes methods known in the art such as electroporation and lipofection. Further approaches are described herein below or are known in the art.

[0170] The term “lipid nanoparticle” or “LNP” is a vesicle comprising a lipid layer encapsulating a pharmaceutically active molecule, such as a nucleic acid molecule, e.g., an iRNA or a plasmid from which an iRNA is transcribed. LNPs are described in, for example, U.S. Pat. Nos. 6,858,225, 6,815,432, 8,158,601, and 8,058,069, the entire contents of which are hereby incorporated herein by reference.

[0171] As used herein, a “subject” is an animal, such as a mammal, including a primate (such as a human, a non-human primate, e.g., a monkey, and a chimpanzee), a non-primate (such as a cow, a pig, a horse, a goat, a rabbit, a sheep, a hamster, a guinea pig, a cat, a dog, a rat, or a mouse), or a bird that expresses the target gene, either endogenously or heterologously.

[0172] In one embodiment, the subject is a human, such as a human being treated or assessed for a disease or disorder that would benefit from reduction in TTR expression; a human at risk for a disease or disorder that would benefit from reduction in TTR expression; a human having a disease or disorder that would benefit from reduction in TTR expression; or human being treated for a disease or disorder that would benefit from reduction in TTR expression as described herein. In some embodiments, the subject is a female human. In other embodiments, the subject is a male human. In one embodiment, the subject is an adult subject. In another embodiment, the subject is a pediatric subject.

[0173] In some embodiments, the human subject is suffering from a TTR-associated disease. In other embodiments, the subject is a subject at risk for developing a TTR-associated disease, e.g., a subject with a TTR gene mutation that is associated with the development of a TTR associated disease, a subject with a family history of TTR-associated disease, or a subject who has signs or symptoms suggesting the development of TTR associated disease without meeting the diagnostic criteria for a TTR-associated disease.

[0174] As used herein, the terms “treating” or “treatment” refer to a beneficial or desired result, such as reducing at least one sign or symptom of an TTR-associated disorder in a subject. Treatment also includes a reduction of one or more sign or symptoms associated with unwanted TTR expression; diminishing the extent of unwanted TTR activation or stabilization; amelioration or palliation of unwanted TTR activation or stabilization. “Treatment” can also mean prolonging survival as compared to expected survival in the absence of treatment.

[0175] The term “lower” in the context of the level of TTR in a subject or a disease marker or symptom refers to a statistically significant decrease in such level. The decrease can be, for example, at least 10%, 15%, 20%, 25%, 30%, %, 40%, 45%, 50%, 55%, 60%, 65%, 70%, 75%, 80%, 85%, 90%, 95%, or more. In certain embodiments, a decrease is at least 20%. In certain embodiments, the decrease is at least 50% in a disease marker, e.g., protein or gene expression level. “Lower” in the context of the level of TTR in a subject is a decrease to a level accepted as within the range of normal for an individual without such disorder. In certain embodiments, “lower” is the decrease in the difference between the level of a marker or symptom for a subject suffering from a disease and a level accepted within the range of normal for an individual. The term “lower” can also be used in association with normalizing a symptom of a disease or condition, i.e. decreasing the difference between a level in a subject suffering from an TTR-associated disorder towards or to a level in a normal subject not suffering from an TTR-associated disorder. As used herein, if a disease is associated with an elevated value for a symptom, “normal” is considered to be the upper limit of normal. If a disease is associated with a decreased value for a symptom, “normal” is considered to be the lower limit of normal.

[0176] As used herein, “prevention” or “preventing,” when used in reference to a disease, disorder or condition thereof, may be treated or ameliorated by a reduction in expression of an TTR gene, refers to a reduction in the likelihood that a subject will develop a symptom associated with such a disease, disorder, or condition, e.g., a symptom of an TTR-associated disorder, e.g., senile systemic amyloidosis (SSA), systemic familial amyloidosis, familial amyloidotic polyneuropathy (FAP), familial amyloidotic cardiomyopathy (FAC), leptomeningeal/Central Nervous System (CNS) amyloidosis, and hyperthyroxinemia. The failure to develop a disease, disorder or condition, or the reduction in the development of a symptom associated with such a disease, disorder or condition (e.g., by at least about 10% on a clinically accepted scale for that disease or disorder), or the exhibition of delayed symptoms delayed (e.g., by days, weeks, months or years) is considered effective prevention.

[0177] A “TTR-associated disease,” as used herein, is intended to include any disease associated with the TTR gene or protein. Such a disease may be caused, for example, by excess production of the TTR protein, by TTR gene mutations, by abnormal cleavage of the TTR protein, instability of TTR tetramers, by abnormal interactions between TTR and other proteins or other endogenous or exogenous substances. A “TTR-associated disease” includes any type of transthyretin-mediated amyloidosis (ATTR amyloidosis) wherein TTR plays a role in the formation of abnormal extracellular aggregates or amyloid deposits, e.g., either herititary ATTR (h-ATTR) amyloidosis or non-heriditary ATTR (ATTR) amyloidosis. TTR-associated diseases include senile systemic amyloidosis (SSA), systemic familial amyloidosis, familial amyloidotic polyneuropathy (FAP), familial amyloidotic cardiomyopathy (FAC), leptomeningeal/Central Nervous System (CNS) amyloidosis, amyloidotic vitreous opacities, carpal tunnel syndrome, hyperthyroxinemia, an ocular disease, e.g., Stargardt's disease, diabetic retinopathy, age-related macular degeneration (AMD), e.g., dry AMD and wet AMD; a metabolic disorder, e.g., a disorder of glucose and lipid homeostasis, e.g., insulin resistance associated with type II diabetes, and a cardiovascular disease. Symptoms of TTR amyloidosis include sensory neuropathy (e.g., paresthesia, hypesthesia in distal limbs), autonomic neuropathy (e.g., gastrointestinal dysfunction, such as gastric ulcer, or orthostatic hypotension), motor neuropathy, seizures, dementia, myelopathy, polyneuropathy, carpal tunnel syndrome, autonomic insufficiency, cardiomyopathy, vitreous opacities, renal insufficiency, nephropathy, substantially reduced mBMI (modified Body Mass Index), cranial nerve dysfunction, and corneal lattice dystrophy.

[0178] “Therapeutically effective amount,” as used herein, is intended to include the amount of an RNAi agent that, when administered to a subject having an TTR-associated disorder, is sufficient to effect treatment of the disease (e.g., by diminishing, ameliorating, or maintaining the existing disease or one or more symptoms of disease). The “therapeutically effective amount” may vary depending on the RNAi agent, how the agent is administered, the disease and its severity and the history, age, weight, family history, genetic makeup, the types of preceding or concomitant treatments, if any, and other individual characteristics of the subject to be treated.

[0179] “Prophylactically effective amount,” as used herein, is intended to include the amount of an RNAi agent that, when administered to a subject having an TTR-associated disorder, is sufficient to prevent or ameliorate the disorder or one or more symptoms of the disorder. Ameliorating the disease includes slowing the course of the disease or reducing the severity of later-developing disease. The “prophylactically effective amount” may vary depending on the RNAi agent, how the agent is administered, the degree of risk of disease, and the history, age, weight, family history, genetic makeup, the types of preceding or concomitant treatments, if any, and other individual characteristics of the patient to be treated.

[0180] A “therapeutically-effective amount” or “prophylactically effective amount” also includes an amount of an RNAi agent that produces some desired effect at a reasonable benefit/risk ratio applicable to any treatment. The iRNA employed in the methods of the present invention may be administered in a sufficient amount to produce a reasonable benefit/risk ratio applicable to such treatment.

[0181] The phrase “pharmaceutically acceptable” is employed herein to refer to those compounds, materials, compositions, or dosage forms which are, within the scope of sound medical judgment, suitable for use in contact with the tissues of human subjects and animal subjects without excessive toxicity, irritation, allergic response, or other problem or complication, commensurate with a reasonable benefit/risk ratio.

[0182] The phrase “pharmaceutically-acceptable carrier” as used herein means a pharmaceutically-acceptable material, composition, or vehicle, such as a liquid or solid filler, diluent, excipient, manufacturing aid (e.g., lubricant, talc magnesium, calcium or zinc stearate, or steric acid), or solvent encapsulating material, involved in carrying or transporting the subject compound from one organ, or portion of the body, to another organ, or portion of the body. Each carrier must be “acceptable” in the sense of being compatible with the other ingredients of the formulation and not injurious to the subject being treated. Such carriers are known in the art. Pharmaceutically acceptable carriers include carriers for administration by injection.

[0183] The term “sample,” as used herein, includes a collection of similar fluids, cells, or tissues isolated from a subject, as well as fluids, cells, or tissues present within a subject. Examples of biological fluids include blood, serum and serosal fluids, plasma, cerebrospinal fluid, ocular fluids, lymph, urine, saliva, and the like. Tissue samples may include samples from tissues, organs, or localized regions. For example, samples may be derived from particular organs, parts of organs, or fluids or cells within those organs. In certain embodiments, samples may be derived from the liver (e.g., whole liver or certain segments of liver or certain types of cells in the liver, such as, e.g., hepatocytes). In some embodiments, a “sample derived from a subject” refers to urine obtained from the subject. A “sample derived from a subject” can refer to blood or blood derived serum or plasma from the subject.

### II. iRNAs of the Invention

[0184] The present invention provides iRNAs which inhibit the expression of an TTR gene. In certain embodiments, the iRNA includes double stranded ribonucleic acid (dsRNA) molecules for inhibiting the expression of an TTR gene in a cell, such as a cell within a subject, e.g., a mammal, such as a human susceptible to developing an TTR-associated disorder, e.g., senile systemic amyloidosis (SSA), systemic familial amyloidosis, familial amyloidotic polyneuropathy (FAP), familial amyloidotic cardiomyopathy (FAC), leptomeningeal/Central Nervous System (CNS) amyloidosis, and hyperthyroxinemia. The dsRNAi agent includes an antisense strand having a region of complementarity which is complementary to at least a part of an mRNA formed in the expression of an TTR gene. The region of complementarity is about 19-30 nucleotides in length (e.g., about 30, 29, 28, 27, 26, 25, 24, 23, 22, 21, 20, or 19 nucleotides in length).

[0185] Upon contact with a cell expressing the TTR gene, the iRNA inhibits the expression of the TTR gene (e.g., a human, a primate, a non-primate, or a rat TTR gene) by at least about 50% as assayed by, for example, a PCR or branched DNA (bDNA)-based method, or by a protein-based method, such as by immunofluorescence analysis, using, for example, western blotting or flow cytometric techniques. In certain embodiments, inhibition of expression is determined by the qPCR method provided in the examples herein with the siRNA at, e.g., a 10 nM concentration, in an appropriate organism cell line provided therein. In certain embodiments, inhibition of expression in vivo is determined by knockdown of the human gene in a rodent expressing the human gene, e.g., a mouse or an AAV-infected mouse expressing the human target gene, e.g., when administered as single dose, e.g., at 3 mg/kg at the nadir of RNA expression.

[0186] A dsRNA includes two RNA strands that are complementary and hybridize to form a duplex structure under conditions in which the dsRNA will be used. One strand of a dsRNA (the antisense strand) includes a region of complementarity that is substantially complementary, and generally fully complementary, to a target sequence. The target sequence can be derived from the sequence of an mRNA formed during the expression of an TTR gene. The other strand (the sense strand) includes a region that is complementary to the antisense strand, such that the two strands hybridize and form a duplex structure when combined under suitable conditions. As described elsewhere herein and as known in the art, the complementary sequences of a dsRNA can also be contained as self-complementary regions of a single nucleic acid molecule, as opposed to being on separate oligonucleotides.

[0187] Generally, the duplex structure is 15 to 30 base pairs in length, e.g., 15-29, 15-28, 15-27, 15-26, 15-25, 15-24, 15-23, 15-22, 15-21, 15-20, 15-19, 15-18, 15-17, 18-30, 18-29, 18-28, 18-27, 18-26, 18-25, 18-24, 18-23, 18-22, 18-21, 18-20, 19-30, 19-29, 19-28, 19-27, 19-26, 19-25, 19-24, 19-23, 19-22, 19-21, 19-20, 20-30, 20-29, 20-28, 20-27, 20-26, 20-25, 20-24, 20-23, 20-22, 20-21, 21-30, 21-29, 21-28, 21-27, 21-26, 21-25, 21-24, 21-23, or 21-22 base pairs in length. In certain embodiments, the duplex structure is 18 to 25 base pairs in length, e.g., 18-25, 18-24, 18-23, 18-22, 18-21, 18-20, 19-25, 19-24, 19-23, 19-22, 19-21, 19-20, 20-25, 20-24, 20-23, 20-22, 20-21, 21-25, 21-24, 21-23, 21-22, 22-25, 22-24, 22-23, 23-25, 23-24 or 24-25 base pairs in length, for example, 19-21 basepairs in length. Ranges and lengths intermediate to the above recited ranges and lengths are also contemplated to be part of the disclosure.

[0188] Similarly, the region of complementarity to the target sequence is 15 to 30 nucleotides in length, e.g., 15-29, 15-28, 15-27, 15-26, 15-25, 15-24, 15-23, 15-22, 15-21, 15-20, 15-19, 15-18, 15-17, 18-30, 18-29, 18-28, 18-27, 18-26, 18-25, 18-24, 18-23, 18-22, 18-21, 18-20, 19-30, 19-29, 19-28, 19-27, 19-26, 19-25, 19-24, 19-23, 19-22, 19-21, 19-20, 20-30, 20-29, 20-28, 20-27, 20-26, 20-25, 20-24,20-23, 20-22, 20-21, 21-30, 21-29, 21-28, 21-27, 21-26, 21-25, 21-24, 21-23, or 21-22 nucleotides in length, for example 19-23 nucleotides in length or 21-23 nucleotides in length. Ranges and lengths intermediate to the above recited ranges and lengths are also contemplated to be part of the disclosure.

[0189] In some embodiments, the duplex structure is 19 to 30 base pairs in length. Similarly, the region of complementarity to the target sequence is 19 to 30 nucleotides in length.

[0190] In some embodiments, the dsRNA is about 19 to about 23 nucleotides in length, or about 25 to about 30 nucleotides in length. In general, the dsRNA is long enough to serve as a substrate for the Dicer enzyme. For example, it is well-known in the art that dsRNAs longer than about 21-23 nucleotides in length may serve as substrates for Dicer. As the ordinarily skilled person will also recognize, the region of an RNA targeted for cleavage will most often be part of a larger RNA molecule, often an mRNA molecule. Where relevant, a “part” of an mRNA target is a contiguous sequence of an mRNA target of sufficient length to allow it to be a substrate for RNAi-directed cleavage (i.e., cleavage through a RISC pathway).

[0191] One of skill in the art will also recognize that the duplex region is a primary functional portion of a dsRNA, e.g., a duplex region of about 19 to about 30 base pairs, e.g., about 19-30, 19-29, 19-28, 19-27, 19-26, 19-25, 19-24, 19-23, 19-22, 19-21, 19-20, 20-30, 20-29, 20-28, 20-27, 20-26, 20-25, 20-24, 20-23, 20-22, 20-21, 21-30, 21-29, 21-28, 21-27, 21-26, 21-25, 21-24, 21-23, or 21-22 base pairs. Thus, in one embodiment, to the extent that it becomes processed to a functional duplex, of e.g., 15-30 base pairs, that targets a desired RNA for cleavage, an RNA molecule or complex of RNA molecules having a duplex region greater than 30 base pairs is a dsRNA. Thus, an ordinarily skilled artisan will recognize that in one embodiment, a miRNA is a dsRNA. In another embodiment, a dsRNA is not a naturally occurring miRNA. In another embodiment, an iRNA agent useful to target TTR gene expression is not generated in the target cell by cleavage of a larger dsRNA.

[0192] A dsRNA as described herein can further include one or more single-stranded nucleotide overhangs, e.g., 1-4, 2-4, 1-3, 2-3, 1, 2, 3, or 4 nucleotides. dsRNAs having at least one nucleotide overhang can have superior inhibitory properties relative to their blunt-ended counterparts. A nucleotide overhang can comprise or consist of a nucleotide/nucleoside analog, including a deoxynucleotide/nucleoside. The overhang(s) can be on the sense strand, the antisense strand, or any combination thereof. Furthermore, the nucleotide(s) of an overhang can be present on the 5′-end, 3′-end, or both ends of an antisense or sense strand of a dsRNA.

[0193] A dsRNA can be synthesized by standard methods known in the art. Double stranded RNAi compounds of the invention may be prepared using a two-step procedure. First, the individual strands of the double stranded RNA molecule are prepared separately. Then, the component strands are annealed. The individual strands of the siRNA compound can be prepared using solution-phase or solid-phase organic synthesis or both. Organic synthesis offers the advantage that the oligonucleotide strands comprising unnatural or modified nucleotides can be easily prepared. Similarly, single-stranded oligonucleotides of the invention can be prepared using solution-phase or solid-phase organic synthesis or both.

[0194] In an aspect, a dsRNA of the invention includes at least two nucleotide sequences, a sense sequence and an anti-sense sequence. The sense strand is selected from the group of sequences provided in any one of Tables 2, 3, 5, and 6, and the corresponding antisense strand of the sense strand is selected from the group of sequences of any one of Tables 2, 3, 5, and 6. In this aspect, one of the two sequences is complementary to the other of the two sequences, with one of the sequences being substantially complementary to a sequence of an mRNA generated in the expression of an TTR gene. As such, in this aspect, a dsRNA will include two oligonucleotides, where one oligonucleotide is described as the sense strand in any one of Tables 2, 3, 5, and 6, and the second oligonucleotide is described as the corresponding antisense strand of the sense strand in any one of Tables 2, 3, 5, and 6.

[0195] In certain embodiments, the substantially complementary sequences of the dsRNA are contained on separate oligonucleotides. In other embodiments, the substantially complementary sequences of the dsRNA are contained on a single oligonucleotide.

[0196] It will be understood that, although the sequences in, for example, Table 2, are not described as modified or conjugated sequences, the RNA of the iRNA of the invention e.g., a dsRNA of the invention, may comprise any one of the sequences set forth in any one of Tables 2, 3, 5, and 6 that is un-modified, un-conjugated, or modified or conjugated differently than described therein. In other words, the invention encompasses dsRNA of Tables 2, 3, 5, and 6 which are un-modified, un-conjugated, modified, or conjugated, as described herein.

[0197] The skilled person is well aware that dsRNAs having a duplex structure of about 20 to 23 base pairs, e.g., 21, base pairs have been hailed as particularly effective in inducing RNA interference (Elbashir et al., EMBO 2001, 20:6877-6888). However, others have found that shorter or longer RNA duplex structures can also be effective (Chu and Rana (2007) RNA 14:1714-1719; Kim et al. (2005) Nat Biotech 23:222-226). In the embodiments described above, by virtue of the nature of the oligonucleotide sequences provided in any one of Tables 2, 3, 5, and 6, dsRNAs described herein can include at least one strand of a length of minimally 21 nucleotides. It can be reasonably expected that shorter duplexes having any one of the sequences in any one of Tables 2, 3, 5, and 6 minus only a few nucleotides on one or both ends can be similarly effective as compared to the dsRNAs described above. Hence, dsRNAs having a sequence of at least 19, 20, or more contiguous nucleotides derived from any one of the sequences of any one of Tables 2, 3, 5, and 6, and differing in their ability to inhibit the expression of an TTR gene by not more than about 5, 10, 15, 20, 25, or 30% inhibition from a dsRNA comprising the full sequence, are contemplated to be within the scope of the present invention.

[0198] In addition, the RNAs provided in Tables 2, 3, 5, and 6 identify a site(s) in an TTR transcript that is susceptible to RISC-mediated cleavage. As such, the present invention further features iRNAs that target within one of these sites. As used herein, an iRNA is said to target within a particular site of an RNA transcript if the iRNA promotes cleavage of the transcript anywhere within that particular site. Such an iRNA will generally include at least about 19 contiguous nucleotides from any one of the sequences provided in any one of Tables 2, 3, 5, and 6 coupled to additional nucleotide sequences taken from the region contiguous to the selected sequence in an TTR gene.

### III. Modified iRNAs of the Invention

[0199] In certain embodiments, the RNA of the iRNA of the invention e.g., a dsRNA, is un-modified, and does not comprise, e.g., chemical modifications or conjugations known in the art and described herein. In other embodiments, the RNA of an iRNA of the invention, e.g., a dsRNA, is chemically modified to enhance stability or other beneficial characteristics. In certain embodiments of the invention, substantially all of the nucleotides of an iRNA of the invention are modified. In other embodiments of the invention, all of the nucleotides of an iRNA or substantially all of the nucleotides of an iRNA are modified, i.e., not more than 5, 4, 3, 2, or 1 unmodified nucleotides are present in a strand of the iRNA.

[0200] The nucleic acids featured in the invention can be synthesized or modified by methods well established in the art, such as those described in “Current protocols in nucleic acid chemistry,” Beaucage, S. L. et al. (Edrs.), John Wiley & Sons, Inc., New York, N.Y., USA, which is hereby incorporated herein by reference. Modifications include, for example, end modifications, e.g., 5′-end modifications (phosphorylation, conjugation, inverted linkages) or 3′-end modifications (conjugation, DNA nucleotides, inverted linkages, etc.); base modifications, e.g., replacement with stabilizing bases, destabilizing bases, or bases that base pair with an expanded repertoire of partners, removal of bases (abasic nucleotides), or conjugated bases; sugar modifications (e.g., at the 2′-position or 4′-position) or replacement of the sugar; or backbone modifications, including modification or replacement of the phosphodiester linkages. Specific examples of iRNA compounds useful in the embodiments described herein include, but are not limited to RNAs containing modified backbones or no natural internucleoside linkages. RNAs having modified backbones include, among others, those that do not have a phosphorus atom in the backbone. For the purposes of this specification, and as sometimes referenced in the art, modified RNAs that do not have a phosphorus atom in their internucleoside backbone can also be considered to be oligonucleosides. In some embodiments, a modified iRNA will have a phosphorus atom in its internucleoside backbone.

[0201] Modified RNA backbones include, for example, phosphorothioates, chiral phosphorothioates, phosphorodithioates, phosphotriesters, aminoalkylphosphotriesters, methyl and other alkyl phosphonates including 3′-alkylene phosphonates and chiral phosphonates, phosphinates, phosphoramidates including 3′-amino phosphoramidate and aminoalkylphosphoramidates, thionophosphoramidates, thionoalkylphosphonates, thionoalkylphosphotriesters, and boranophosphates having normal 3′-5′ linkages, 2′-5′-linked analogs of these, and those having inverted polarity wherein the adjacent pairs of nucleoside units are linked 3′-5′ to 5′-3′ or 2′-5′ to 5′-2′. Various salts, mixed salts and free acid forms are also included. In some embodiments of the invention, the dsRNA agents of the invention are in a free acid form. In other embodiments of the invention, the dsRNA agents of the invention are in a salt form. In one embodiment, the dsRNA agents of the invention are in a sodium salt form. In certain embodiments, when the dsRNA agents of the invention are in the sodium salt form, sodium ions are present in the agent as counterions for substantially all of the phosphodiester and/or phosphorothiotate groups present in the agent. Agents in which substantially all of the phosphodiester and/or phosphorothioate linkages have a sodium counterion include not more than 5, 4, 3, 2, or 1 phosphodiester and/or phosphorothioate linkages without a sodium counterion. In some embodiments, when the dsRNA agents of the invention are in the sodium salt form, sodium ions are present in the agent as counterions for all of the phosphodiester and/or phosphorothiotate groups present in the agent.

[0202] Representative U.S. patents that teach the preparation of the above phosphorus-containing linkages include, but are not limited to, U.S. Pat. Nos. 3,687,808; 4,469,863; 4,476,301; 5,023,243; 5,177,195; 5,188,897; 5,264,423; 5,276,019; 5,278,302; 5,286,717; 5,321,131; 5,399,676; 5,405,939; 5,453,496; 5,455,233; 5,466,677; 5,476,925; 5,519,126; 5,536,821; 5,541,316; 5,550,111; 5,563,253; 5,571,799; 5,587,361; 5,625,050; 6,028,188; 6,124,445; 6,160,109; 6,169,170; 6,172,209; 6,239,265; 6,277,603; 6,326,199; 6,346,614; 6,444,423; 6,531,590; 6,534,639; 6,608,035; 6,683,167; 6,858,715; 6,867,294; 6,878,805; 7,015,315; 7,041,816; 7,273,933; 7,321,029; and U.S. Pat. RE39464, the entire contents of each of which are hereby incorporated herein by reference.

[0203] Modified RNA backbones that do not include a phosphorus atom therein have backbones that are formed by short chain alkyl or cycloalkyl internucleoside linkages, mixed heteroatoms and alkyl or cycloalkyl internucleoside linkages, or one or more short chain heteroatomic or heterocyclic internucleoside linkages. These include those having morpholino linkages (formed in part from the sugar portion of a nucleoside); siloxane backbones; sulfide, sulfoxide and sulfone backbones; formacetyl and thioformacetyl backbones; methylene formacetyl and thioformacetyl backbones; alkene containing backbones; sulfamate backbones; methyleneimino and methylenehydrazino backbones; sulfonate and sulfonamide backbones; amide backbones; and others having mixed N, O, S, and CH₂ component parts.

[0204] Representative U.S. patents that teach the preparation of the above oligonucleosides include, but are not limited to, U.S. Pat. Nos. 5,034,506; 5,166,315; 5,185,444; 5,214,134; 5,216,141; 5,235,033; 5,64,562; 5,264,564; 5,405,938; 5,434,257; 5,466,677; 5,470,967; 5,489,677; 5,541,307; 5,561,225; 5,596,086; 5,602,240; 5,608,046; 5,610,289; 5,618,704; 5,623,070; 5,663,312; 5,633,360; 5,677,437; and 5,677,439, the entire contents of each of which are hereby incorporated herein by reference.

[0205] Suitable RNA mimetics are contemplated for use in iRNAs provided herein, in which both the sugar and the internucleoside linkage, i.e., the backbone, of the nucleotide units are replaced with novel groups. The base units are maintained for hybridization with an appropriate nucleic acid target compound. One such oligomeric compound in which an RNA mimetic that has been shown to have excellent hybridization properties is referred to as a peptide nucleic acid (PNA). In PNA compounds, the sugar backbone of an RNA is replaced with an amide containing backbone, in particular an aminoethylglycine backbone. The nucleobases are retained and are bound directly or indirectly to aza nitrogen atoms of the amide portion of the backbone. Representative US patents that teach the preparation of PNA compounds include, but are not limited to, U.S. Pat. Nos. 5,539,082; 5,714,331; and 5,719,262, the entire contents of each of which are hereby incorporated herein by reference. Additional PNA compounds suitable for use in the iRNAs of the invention are described in, for example, in Nielsen et al., Science, 1991, 254, 1497-1500.

[0206] Some embodiments featured in the invention include RNAs with phosphorothioate backbones and oligonucleosides with heteroatom backbones, and in particular —CH₂—NH—CH₂—, —CH₂—N(CH₃)—O—CH₂— [known as a methylene (methylimino) or MMI backbone], —CH₂—O—N(CH₃)—CH₂—, —CH₂—N(CH₃)—N(CH₃)—CH₂— and —N(CH₃)—CH₂—CH₂— of the above-referenced U.S. Pat. No. 5,489,677, and the amide backbones of the above-referenced U.S. Pat. No. 5,602,240. In some embodiments, the RNAs featured herein have morpholino backbone structures of the above-referenced U.S. Pat. No. 5,034,506. The native phosphodiester backbone can be represented as O—P(O)(OH)—OCH2-.

[0207] Modified RNAs can also contain one or more substituted sugar moieties. The iRNAs, e.g., dsRNAs, featured herein can include one of the following at the 2′-position: OH; F; O-, S-, or N-alkyl; O-, S-, or N-alkenyl; O-, S- or N-alkynyl; or O-alkyl-O-alkyl, wherein the alkyl, alkenyl and alkynyl can be substituted or unsubstituted C₁ to C₁₀ alkyl or C₂ to C₁₀ alkenyl and alkynyl. Exemplary suitable modifications include O[(CH₂)ₘO]ₘCH₃, O(CH₂).ₙOCH₃, O(CH₂)ₙNH₂, O(CH₂)ₙCH₃, O(CH₂)ₙONH₂, and O(CH₂)ₙON[(CH₂)ₙCH₃)]₂, where n and m are from 1 to about 10. In other embodiments, dsRNAs include one of the following at the 2′ position: C₁ to C₁₀ lower alkyl, substituted lower alkyl, alkaryl, aralkyl, O-alkaryl or O-aralkyl, SH, SCH₃, OCN, Cl, Br, CN, CF₃, OCF₃, SOCH₃, SO₂CH₃, ONO₂, NO₂, N₃, NH₂, heterocycloalkyl, heterocycloalkaryl, aminoalkylamino, polyalkylamino, substituted silyl, an RNA cleaving group, a reporter group, an intercalator, a group for improving the pharmacokinetic properties of an iRNA, or a group for improving the pharmacodynamic properties of an iRNA, and other substituents having similar properties. In some embodiments, the modification includes a 2′-methoxyethoxy (2′-O—CH₂CH₂OCH₃, also known as 2′-O-(2-methoxyethyl) or 2′-MOE) (Martin et al., Helv. Chim. Acta, 1995, 78:486-504) i.e., an alkoxy-alkoxy group. Another exemplary modification is 2′-dimethylaminooxyethoxy, i.e., a O(CH₂)₂ON(CH₃)₂ group, also known as 2′-DMAOE, as described in examples herein below, and 2′-dimethylaminoethoxyethoxy (also known in the art as 2′-O-dimethylaminoethoxyethyl or 2′-DMAEOE), i.e., 2′-O—CH₂—O—CH₂—N(CH₃)₂. Further exemplary modifications include: 5′-Me-2′-F nucleotides, 5′-Me-2′-OMe nucleotides, 5′-Me-2′-deoxynucleotides, (both R and S isomers in these three families); 2′-alkoxyalkyl; and 2′-NMA (N-methylacetamide).

[0208] Other modifications include 2′-methoxy (2′-OCH₃), 2′-aminopropoxy (2′-OCH₂CH₂CH₂NH₂) and 2′-fluoro (2′-F). Similar modifications can also be made at other positions on the RNA of an iRNA, particularly the 3′ position of the sugar on the 3′ terminal nucleotide or in 2′-5′ linked dsRNAs and the 5′ position of 5′ terminal nucleotide. iRNAs can also have sugar mimetics such as cyclobutyl moieties in place of the pentofuranosyl sugar. Representative US patents that teach the preparation of such modified sugar structures include, but are not limited to, U.S. Pat. Nos. 4,981,957; 5,118,800; 5,319,080; 5,359,044; 5,393,878; 5,446,137; 5,466,786; 5,514,785; 5,519,134; 5,567,811; 5,576,427; 5,591,722; 5,597,909; 5,610,300; 5,627,053; 5,639,873; 5,646,265; 5,658,873; 5,670,633; and 5,700,920, certain of which are commonly owned with the instant application. The entire contents of each of the foregoing are hereby incorporated herein by reference.

[0209] An iRNA can also include nucleobase (often referred to in the art simply as “base”) modifications or substitutions. As used herein, “unmodified” or “natural” nucleobases include the purine bases adenine (A) and guanine (G), and the pyrimidine bases thymine (T), cytosine (C), and uracil (U). Modified nucleobases include other synthetic and natural nucleobases such as deoxythimidine (dT), 5-methylcytosine (5-me-C), 5-hydroxymethyl cytosine, xanthine, hypoxanthine, 2-aminoadenine, 6-methyl and other alkyl derivatives of adenine and guanine, 2-propyl and other alkyl derivatives of adenine and guanine, 2-thiouracil, 2-thiothymine and 2-thiocytosine, 5-halouracil and cytosine, 5-propynyl uracil and cytosine, 6-azo uracil, cytosine and thymine, 5-uracil (pseudouracil), 4-thiouracil, 8-halo, 8-amino, 8-thiol, 8-thioalkyl, 8-hydroxyl anal other 8-substituted adenines and guanines, 5-halo, particularly 5-bromo, 5-trifluoromethyl and other 5-substituted uracils and cytosines, 7-methylguanine and 7-methyladenine, 8-azaguanine and 8-azaadenine, 7-deazaguanine and 7-daazaadenine and 3-deazaguanine and 3-deazaadenine. Further nucleobases include those disclosed in U.S. Pat. No. 3,687,808, those disclosed in Modified Nucleosides in Biochemistry, Biotechnology and Medicine, Herdewijn, P. ed. Wiley-VCH, 2008; those disclosed in The Concise Encyclopedia Of Polymer Science And Engineering, pages 858-859, Kroschwitz, J. L, ed. John Wiley & Sons, 1990, these disclosed by Englisch et al., Angewandte Chemie, International Edition, 1991, 30, 613, and those disclosed by Sanghvi, Y S., Chapter 15, dsRNA Research and Applications, pages 289-302, Crooke, S. T. and Lebleu, B., Ed., CRC Press, 1993. Certain of these nucleobases are particularly useful for increasing the binding affinity of the oligomeric compounds featured in the invention. These include 5-substituted pyrimidines, 6-azapyrimidines and N-2, N-6 and 0-6 substituted purines, including 2-aminopropyladenine, 5-propynyluracil and 5-propynylcytosine. 5-methylcytosine substitutions have been shown to increase nucleic acid duplex stability by 0.6-1.2° C. (Sanghvi, Y. S., Crooke, S. T. and Lebleu, B., Eds., dsRNA Research and Applications, CRC Press, Boca Raton, 1993, pp. 276-278) and are exemplary base substitutions, even more particularly when combined with 2′-O-methoxyethyl sugar modifications.

[0210] Representative U.S. patents that teach the preparation of certain of the above noted modified nucleobases as well as other modified nucleobases include, but are not limited to, the above noted U.S. Pat. Nos. 3,687,808, 4,845,205; 5,130,30; 5,134,066; 5,175,273; 5,367,066; 5,432,272; 5,457,187; 5,459,255; 5,484,908; 5,502,177; 5,525,711; 5,552,540; 5,587,469; 5,594,121, 5,596,091; 5,614,617; 5,681,941; 5,750,692; 6,015,886; 6,147,200; 6,166,197; 6,222,025; 6,235,887; 6,380,368; 6,528,640; 6,639,062; 6,617,438; 7,045,610; 7,427,672; and 7,495,088, the entire contents of each of which are hereby incorporated herein by reference.

[0211] In some embodiments, an RNAi agent of the disclosure can also be modified to include one or more bicyclic sugar moieties. A “bicyclic sugar” is a furanosyl ring modified by a ring formed by the bridging of two carbons, whether adjacent or non-adjacent. A “bicyclic nucleoside” (“BNA”) is a nucleoside having a sugar moiety comprising a ring formed by bridging two carbons, whether adjacent or non-adjacent, of the sugar ring, thereby forming a bicyclic ring system. In certain embodiments, the bridge connects the 4′-carbon and the 2′-carbon of the sugar ring, optionally, via the 2′-acyclic oxygen atom. Thus, in some embodiments an agent of the invention may include one or more locked nucleic acids (LNA). A locked nucleic acid is a nucleotide having a modified ribose moiety in which the ribose moiety comprises an extra bridge connecting the 2′ and 4′ carbons. In other words, an LNA is a nucleotide comprising a bicyclic sugar moiety comprising a 4′-CH₂—O-2′ bridge. This structure effectively “locks” the ribose in the 3′-endo structural conformation. The addition of locked nucleic acids to siRNAs has been shown to increase siRNA stability in serum, and to reduce off-target effects (Elmen, J. et al., (2005) Nucleic Acids Research 33(1):439-447; Mook, O R. et al., (2007) Mol Canc Ther 6(3):833-843; Grunweller, A. et al., (2003) Nucleic Acids Research 31(12):3185-3193). Examples of bicyclic nucleosides for use in the polynucleotides of the invention include without limitation nucleosides comprising a bridge between the 4′ and the 2′ ribosyl ring atoms. In certain embodiments, the antisense polynucleotide agents of the invention include one or more bicyclic nucleosides comprising a 4′ to 2′ bridge.

[0212] A locked nucleoside can be represented by the structure (omitting stereochemistry),

[chemical structure]

[0213] wherein B is a nucleobase or modified nucleobase and L is the linking group that joins the 2′-carbon to the 4′-carbon of the ribose ring. Examples of such 4′ to 2′ bridged bicyclic nucleosides, include but are not limited to 4′-(CH₂)—O-2′ (LNA); 4′-(CH₂)—S-2′; 4′-(CH₂)₂—O-2′ (ENA); 4′-CH(CH₃)—O-2′ (also referred to as “constrained ethyl” or “cEt”) and 4′-CH(CH₂OCH₃)—O-2′ (and analogs thereof; see, e.g., U.S. Pat. No. 7,399,845); 4′-C(CH₃)(CH₃)—O-2′ (and analogs thereof; see e.g., U.S. Pat. No. 8,278,283); 4′-CH₂—N(OCH₃)-2′ (and analogs thereof; see e.g., U.S. Pat. No. 8,278,425); 4′-CH₂—O—N(CH₃)-2′ (see, e.g., U.S. Patent Publication No. 2004/0171570); 4′-CH₂—N(R)—O-2′, wherein R is H, C1-C12 alkyl, or a nitrogen protecting group (see, e.g., U.S. Pat. No. 7,427,672); 4′-CH₂—C(H)(CH₃)-2′ (see, e.g., Chattopadhyaya et al., J. Org. Chem., 2009, 74, 118-134); and 4′-CH₂—C(═CH₂)-2′ (and analogs thereof; see, e.g., U.S. Pat. No. 8,278,426). The entire contents of each of the foregoing are hereby incorporated herein by reference.

[0214] Additional representative U.S. patents and U.S. Patent Publications that teach the preparation of locked nucleic acid nucleotides include, but are not limited to, the following: U.S. Pat. Nos. 6,268,490; 6,525,191; 6,670,461; 6,770,748; 6,794,499; 6,998,484; 7,053,207; 7,034,133; 7,084,125; 7,399,845; 7,427,672; 7,569,686; 7,741,457; 8,022,193; 8,030,467; 8,278,425; 8,278,426; 8,278,283; US 2008/0039618; and US 2009/0012281, the entire contents of each of which are hereby incorporated herein by reference.

[0215] Any of the foregoing bicyclic nucleosides can be prepared having one or more stereochemical sugar configurations including for example α-L-ribofuranose and β-D-ribofuranose (see WO 99/14226).

[0216] The RNA of an iRNA can also be modified to include one or more constrained ethyl nucleotides. As used herein, a “constrained ethyl nucleotide” or “cEt” is a locked nucleic acid comprising a bicyclic sugar moiety comprising a 4′-CH(CH₃)—O-2′ bridge (i.e., L in the preceding structure). In one embodiment, a constrained ethyl nucleotide is in the S conformation referred to herein as “S-cEt.”

[0217] An iRNA of the invention may also include one or more “conformationally restricted nucleotides” (“CRN”). CRN are nucleotide analogs with a linker connecting the C2′ and C4′ carbons of ribose or the C3 and —C5′ carbons of ribose. CRN lock the ribose ring into a stable conformation and increase the hybridization affinity to mRNA. The linker is of sufficient length to place the oxygen in an optimal position for stability and affinity resulting in less ribose ring puckering.

[0218] Representative publications that teach the preparation of certain of the above noted CRN include, but are not limited to, U.S. Patent Publication No. 2013/0190383; and PCT publication WO 2013/036868, the entire contents of each of which are hereby incorporated herein by reference.

[0219] In some embodiments, an iRNA of the invention comprises one or more monomers that are UNA (unlocked nucleic acid) nucleotides. UNA is unlocked acyclic nucleic acid, wherein any of the bonds of the sugar has been removed, forming an unlocked “sugar” residue. In one example, UNA also encompasses monomer with bonds between C1′-C4′ have been removed (i.e. the covalent carbon-oxygen-carbon bond between the C1′ and C4′ carbons). In another example, the C2′-C3′ bond (i.e. the covalent carbon-carbon bond between the C2′ and C3′ carbons) of the sugar has been removed (see Nuc. Acids Symp. Series, 52, 133-134 (2008) and Fluiter et al., Mol. Biosyst., 2009, 10, 1039 hereby incorporated by reference).

[0220] Representative U.S. publications that teach the preparation of UNA include, but are not limited to, U.S. Pat. No. 8,314,227; and U.S. Patent Publication Nos. 2013/0096289; 2013/0011922; and 2011/0313020, the entire contents of each of which are hereby incorporated herein by reference.

[0221] Potentially stabilizing modifications to the ends of RNA molecules can include N-(acetylaminocaproyl)-4-hydroxyprolinol (Hyp-C6-NHAc), N-(caproyl-4-hydroxyprolinol (Hyp-C6), N-(acetyl-4-hydroxyprolinol (Hyp-NHAc), thymidine-2′-0-deoxythymidine (ether), N-(aminocaproyl)-4-hydroxyprolinol (Hyp-C6-amino), 2-docosanoyl-uridine-3″-phosphate, inverted base dT(idT) and others. Disclosure of this modification can be found in PCT Publication No. WO 2011/005861.

[0222] Other modifications of the nucleotides of an iRNA of the invention include a 5′ phosphate or 5′ phosphate mimic, e.g., a 5′-terminal phosphate or phosphate mimic on the antisense strand of an iRNA. Suitable phosphate mimics are disclosed in, for example U.S. Patent Publication No. 2012/0157511, the entire contents of which are incorporated herein by reference.

[0223] A. Modified iRNAs Comprising Motifs of the Invention

[0224] In certain aspects of the invention, the double stranded RNA agents of the invention include agents with chemical modifications as disclosed, for example, in WO2013/075035, the entire contents of each of which are incorporated herein by reference. As shown herein and in WO2013/075035, one or more motifs of three identical modifications on three consecutive nucleotides may be introduced into a sense strand or antisense strand of a dsRNAi agent, particularly at or near the cleavage site. In some embodiments, the sense strand and antisense strand of the dsRNAi agent may otherwise be completely modified. The introduction of these motifs interrupts the modification pattern, if present, of the sense or antisense strand. The dsRNAi agent may be optionally conjugated with a GalNAc derivative ligand, for instance on the sense strand.

[0225] More specifically, when the sense strand and antisense strand of the double stranded RNA agent are completely modified to have one or more motifs of three identical modifications on three consecutive nucleotides at or near the cleavage site of at least one strand of a dsRNAi agent, the gene silencing activity of the dsRNAi agent was observed.

[0226] Accordingly, the invention provides double stranded RNA agents capable of inhibiting the expression of a target gene (i.e., TTR gene) in vivo. The RNAi agent comprises a sense strand and an antisense strand. Each strand of the RNAi agent may be, for example, 17-30 nucleotides in length, 25-30 nucleotides in length, 27-30 nucleotides in length, 19-25 nucleotides in length, 19-23 nucleotides in length, 19-21 nucleotides in length, 21-25 nucleotides in length, or 21-23 nucleotides in length.

[0227] The sense strand and antisense strand typically form a duplex double stranded RNA (“dsRNA”), also referred to herein as “dsRNAi agent.” The duplex region of a dsRNAi agent may be, for example, the duplex region can be 27-30 nucleotide pairs in length, 19-25 nucleotide pairs in length, 19-23 nucleotide pairs in length, 19-21 nucleotide pairs in length, 21-25 nucleotide pairs in length, or 21-23 nucleotide pairs in length. In another example, the duplex region is selected from 19, 20, 21, 22, 23, 24, 25, 26, and 27 nucleotides in length.

[0228] In certain embodiments, the dsRNAi agent may contain one or more overhang regions or capping groups at the 3′-end, 5′-end, or both ends of one or both strands. The overhang can be, independently, 1-6 nucleotides in length, for instance 2-6 nucleotides in length, 1-5 nucleotides in length, 2-5 nucleotides in length, 1-4 nucleotides in length, 2-4 nucleotides in length, 1-3 nucleotides in length, 2-3 nucleotides in length, or 1-2 nucleotides in length. In certain embodiments, the overhang regions can include extended overhang regions as provided above. The overhangs can be the result of one strand being longer than the other, or the result of two strands of the same length being staggered. The overhang can form a mismatch with the target mRNA or it can be complementary to the gene sequences being targeted or can be another sequence. The first and second strands can also be joined, e.g., by additional bases to form a hairpin, or by other non-base linkers.

[0229] In certain embodiments, the nucleotides in the overhang region of the dsRNAi agent can each independently be a modified or unmodified nucleotide including, but no limited to 2′-sugar modified, such as, 2′-F, 2′-O-methyl, thymidine (T), 2′-O-methoxyethyl-5-methyluridine (Teo), 2′-O-methoxyethyladenosine (Aeo), 2′-O-methoxyethyl-5-methylcytidine (m5Ceo), and any combinations thereof.

[0230] For example, TT can be an overhang sequence for either end on either strand. The overhang can form a mismatch with the target mRNA or it can be complementary to the gene sequences being targeted or can be another sequence.

[0231] The 5′- or 3′-overhangs at the sense strand, antisense strand, or both strands of the dsRNAi agent may be phosphorylated. In some embodiments, the overhang region(s) contains two nucleotides having a phosphorothioate between the two nucleotides, where the two nucleotides can be the same or different. In some embodiments, the overhang is present at the 3′-end of the sense strand, antisense strand, or both strands. In some embodiments, this 3′-overhang is present in the antisense strand. In some embodiments, this 3′-overhang is present in the sense strand.

[0232] The dsRNAi agent may contain only a single overhang, which can strengthen the interference activity of the RNAi, without affecting its overall stability. For example, the single-stranded overhang may be located at the 3′-end of the sense strand or, alternatively, at the 3-end of the antisense strand. The RNAi may also have a blunt end, located at the 5′-end of the antisense strand (i.e., the 3′-end of the sense strand) or vice versa. Generally, the antisense strand of the dsRNAi agent has a nucleotide overhang at the 3′-end, and the 5′-end is blunt. While not wishing to be bound by theory, the asymmetric blunt end at the 5′-end of the antisense strand and 3′-end overhang of the antisense strand favor the guide strand loading into RISC process.

[0233] In certain embodiments, the dsRNAi agent is a double blunt-ended of 19 nucleotides in length, wherein the sense strand contains at least one motif of three 2′-F modifications on three consecutive nucleotides at positions 7, 8, 9 from the 5′end. The antisense strand contains at least one motif of three 2′-O-methyl modifications on three consecutive nucleotides at positions 11, 12, and 13 from the 5′end.

[0234] In other embodiments, the dsRNAi agent is a double blunt-ended of 20 nucleotides in length, wherein the sense strand contains at least one motif of three 2′-F modifications on three consecutive nucleotides at positions 8, 9, and 10 from the 5′end. The antisense strand contains at least one motif of three 2′-O-methyl modifications on three consecutive nucleotides at positions 11, 12, and 13 from the 5′end.

[0235] In yet other embodiments, the dsRNAi agent is a double blunt-ended of 21 nucleotides in length, wherein the sense strand contains at least one motif of three 2′-F modifications on three consecutive nucleotides at positions 9, 10, and 11 from the 5′end. The antisense strand contains at least one motif of three 2′-O-methyl modifications on three consecutive nucleotides at positions 11, 12, and 13 from the 5′end.

[0236] In certain embodiments, the dsRNAi agent comprises a 21 nucleotide sense strand and a 23 nucleotide antisense strand, wherein the sense strand contains at least one motif of three 2′-F modifications on three consecutive nucleotides at positions 9, 10, and 11 from the 5′end; the antisense strand contains at least one motif of three 2′-O-methyl modifications on three consecutive nucleotides at positions 11, 12, and 13 from the 5′end, wherein one end of the RNAi agent is blunt, while the other end comprises a 2 nucleotide overhang. In one embodiment, the 2 nucleotide overhang is at the 3′-end of the antisense strand.

[0237] When the 2 nucleotide overhang is at the 3′-end of the antisense strand, there may be two phosphorothioate internucleotide linkages between the terminal three nucleotides, wherein two of the three nucleotides are the overhang nucleotides, and the third nucleotide is a paired nucleotide next to the overhang nucleotide. In one embodiment, the RNAi agent additionally has two phosphorothioate internucleotide linkages between the terminal three nucleotides at both the 5′-end of the sense strand and at the 5′-end of the antisense strand. In certain embodiments, every nucleotide in the sense strand and the antisense strand of the dsRNAi agent, including the nucleotides that are part of the motifs are modified nucleotides. In certain embodiments each residue is independently modified with a 2′-O-methyl or 3′-fluoro, e.g., in an alternating motif. Optionally, the dsRNAi agent further comprises a ligand (such as, GalNAc₃).

[0238] In certain embodiments, the dsRNAi agent comprises a sense and an antisense strand, wherein the sense strand is 25-30 nucleotide residues in length, wherein starting from the 5′ terminal nucleotide (position 1) positions 1 to 23 of the first strand comprise at least 8 ribonucleotides; the antisense strand is 36-66 nucleotide residues in length and, starting from the 3′ terminal nucleotide, comprises at least 8 ribonucleotides in the positions paired with positions 1-23 of sense strand to form a duplex; wherein at least the 3′ terminal nucleotide of antisense strand is unpaired with sense strand, and up to 6 consecutive 3′ terminal nucleotides are unpaired with sense strand, thereby forming a 3′ single stranded overhang of 1-6 nucleotides; wherein the 5′ terminus of antisense strand comprises from 10-30 consecutive nucleotides which are unpaired with sense strand, thereby forming a 10-30 nucleotide single stranded 5′ overhang; wherein at least the sense strand 5′ terminal and 3′ terminal nucleotides are base paired with nucleotides of antisense strand when sense and antisense strands are aligned for maximum complementarity, thereby forming a substantially duplexed region between sense and antisense strands; and antisense strand is sufficiently complementary to a target RNA along at least 19 ribonucleotides of antisense strand length to reduce target gene expression when the double stranded nucleic acid is introduced into a mammalian cell; and wherein the sense strand contains at least one motif of three 2′-F modifications on three consecutive nucleotides, where at least one of the motifs occurs at or near the cleavage site. The antisense strand contains at least one motif of three 2′-O-methyl modifications on three consecutive nucleotides at or near the cleavage site.

[0239] In certain embodiments, the dsRNAi agent comprises sense and antisense strands, wherein the dsRNAi agent comprises a first strand having a length which is at least 25 and at most 29 nucleotides and a second strand having a length which is at most 30 nucleotides with at least one motif of three 2′-O-methyl modifications on three consecutive nucleotides at position 11, 12, 13 from the 5′ end; wherein the 3′ end of the first strand and the 5′ end of the second strand form a blunt end and the second strand is 1-4 nucleotides longer at its 3′ end than the first strand, wherein the duplex region which is at least 25 nucleotides in length, and the second strand is sufficiently complementary to a target mRNA along at least 19 nucleotide of the second strand length to reduce target gene expression when the RNAi agent is introduced into a mammalian cell, and wherein Dicer cleavage of the dsRNAi agent results in an siRNA comprising the 3′-end of the second strand, thereby reducing expression of the target gene in the mammal. Optionally, the dsRNAi agent further comprises a ligand.

[0240] In certain embodiments, the sense strand of the dsRNAi agent contains at least one motif of three identical modifications on three consecutive nucleotides, where one of the motifs occurs at the cleavage site in the sense strand.

[0241] In certain embodiments, the antisense strand of the dsRNAi agent can also contain at least one motif of three identical modifications on three consecutive nucleotides, where one of the motifs occurs at or near the cleavage site in the antisense strand.

[0242] For a dsRNAi agent having a duplex region of 19-23 nucleotides in length, the cleavage site of the antisense strand is typically around the 10, 11, and 12 positions from the 5′-end. Thus the motifs of three identical modifications may occur at the 9, 10, 11 positions; the 10, 11, 12 positions; the 11, 12, 13 positions; the 12, 13, 14 positions; or the 13, 14, 15 positions of the antisense strand, the count starting from the first nucleotide from the 5′-end of the antisense strand, or, the count starting from the first paired nucleotide within the duplex region from the 5′-end of the antisense strand. The cleavage site in the antisense strand may also change according to the length of the duplex region of the dsRNAi agent from the 5′-end.

[0243] The sense strand of the dsRNAi agent may contain at least one motif of three identical modifications on three consecutive nucleotides at the cleavage site of the strand; and the antisense strand may have at least one motif of three identical modifications on three consecutive nucleotides at or near the cleavage site of the strand. When the sense strand and the antisense strand form a dsRNA duplex, the sense strand and the antisense strand can be so aligned that one motif of the three nucleotides on the sense strand and one motif of the three nucleotides on the antisense strand have at least one nucleotide overlap, i.e., at least one of the three nucleotides of the motif in the sense strand forms a base pair with at least one of the three nucleotides of the motif in the antisense strand. Alternatively, at least two nucleotides may overlap, or all three nucleotides may overlap.

[0244] In some embodiments, the sense strand of the dsRNAi agent may contain more than one motif of three identical modifications on three consecutive nucleotides. The first motif may occur at or near the cleavage site of the strand and the other motifs may be a wing modification. The term “wing modification” herein refers to a motif occurring at another portion of the strand that is separated from the motif at or near the cleavage site of the same strand. The wing modification is either adjacent to the first motif or is separated by at least one or more nucleotides. When the motifs are immediately adjacent to each other then the chemistries of the motifs are distinct from each other, and when the motifs are separated by one or more nucleotide than the chemistries can be the same or different. Two or more wing modifications may be present. For instance, when two wing modifications are present, each wing modification may occur at one end relative to the first motif which is at or near cleavage site or on either side of the lead motif.

[0245] Like the sense strand, the antisense strand of the dsRNAi agent may contain more than one motif of three identical modifications on three consecutive nucleotides, with at least one of the motifs occurring at or near the cleavage site of the strand. This antisense strand may also contain one or more wing modifications in an alignment similar to the wing modifications that may be present on the sense strand.

[0246] In some embodiments, the wing modification on the sense strand or antisense strand of the dsRNAi agent typically does not include the first one or two terminal nucleotides at the 3′-end, 5′-end, or both ends of the strand.

[0247] In other embodiments, the wing modification on the sense strand or antisense strand of the dsRNAi agent typically does not include the first one or two paired nucleotides within the duplex region at the 3′-end, 5′-end, or both ends of the strand.

[0248] When the sense strand and the antisense strand of the dsRNAi agent each contain at least one wing modification, the wing modifications may fall on the same end of the duplex region, and have an overlap of one, two, or three nucleotides.

[0249] When the sense strand and the antisense strand of the dsRNAi agent each contain at least two wing modifications, the sense strand and the antisense strand can be so aligned that two modifications each from one strand fall on one end of the duplex region, having an overlap of one, two, or three nucleotides; two modifications each from one strand fall on the other end of the duplex region, having an overlap of one, two or three nucleotides; two modifications one strand fall on each side of the lead motif, having an overlap of one, two or three nucleotides in the duplex region.

[0250] In some embodiments, every nucleotide in the sense strand and antisense strand of the dsRNAi agent, including the nucleotides that are part of the motifs, may be modified. Each nucleotide may be modified with the same or different modification which can include one or more alteration of one or both of the non-linking phosphate oxygens or of one or more of the linking phosphate oxygens; alteration of a constituent of the ribose sugar, e.g., of the 2′-hydroxyl on the ribose sugar; wholesale replacement of the phosphate moiety with “dephospho” linkers; modification or replacement of a naturally occurring base; and replacement or modification of the ribose-phosphate backbone.

[0251] As nucleic acids are polymers of subunits, many of the modifications occur at a position which is repeated within a nucleic acid, e.g., a modification of a base, or a phosphate moiety, or a non-linking O of a phosphate moiety. In some cases the modification will occur at all of the subject positions in the nucleic acid but in many cases it will not. By way of example, a modification may only occur at a 3′- or 5′ terminal position, may only occur in a terminal region, e.g., at a position on a terminal nucleotide or in the last 2, 3, 4, 5, or 10 nucleotides of a strand. A modification may occur in a double strand region, a single strand region, or in both. A modification may occur only in the double strand region of an RNA or may only occur in a single strand region of a RNA. For example, a phosphorothioate modification at a non-linking O position may only occur at one or both termini, may only occur in a terminal region, e.g., at a position on a terminal nucleotide or in the last 2, 3, 4, 5, or 10 nucleotides of a strand, or may occur in double strand and single strand regions, particularly at termini. The 5′-end or ends can be phosphorylated.

[0252] It may be possible, e.g., to enhance stability, to include particular bases in overhangs, or to include modified nucleotides or nucleotide surrogates, in single strand overhangs, e.g., in a 5′- or 3′-overhang, or in both. For example, it can be desirable to include purine nucleotides in overhangs. In some embodiments all or some of the bases in a 3′- or 5′-overhang may be modified, e.g., with a modification described herein. Modifications can include, e.g., the use of modifications at the 2′ position of the ribose sugar with modifications that are known in the art, e.g., the use of deoxyribonucleotides, 2′-deoxy-2′-fluoro (2′-F) or 2′-O-methyl modified instead of the ribosugar of the nucleobase, and modifications in the phosphate group, e.g., phosphorothioate modifications. Overhangs need not be homologous with the target sequence.

[0253] In some embodiments, each residue of the sense strand and antisense strand is independently modified with LNA, CRN, cET, UNA, HNA, CeNA, 2′-methoxyethyl, 2′-O-methyl, 2′-O-allyl, 2′-C-allyl, 2′-deoxy, 2′-hydroxyl, or 2′-fluoro. The strands can contain more than one modification. In one embodiment, each residue of the sense strand and antisense strand is independently modified with 2′-O-methyl or 2′-fluoro.

[0254] At least two different modifications are typically present on the sense strand and antisense strand. Those two modifications may be the 2′-O-methyl or 2′-fluoro modifications, or others.

[0255] In certain embodiments, the Nₐ or N_{b} comprise modifications of an alternating pattern. The term “alternating motif” as used herein refers to a motif having one or more modifications, each modification occurring on alternating nucleotides of one strand. The alternating nucleotide may refer to one per every other nucleotide or one per every three nucleotides, or a similar pattern. For example, if A, B and C each represent one type of modification to the nucleotide, the alternating motif can be “ABABABABABAB . . . ,” “AABBAABBAABB . . . ,” “AABAABAABAAB . . . ,” “AAABAAABAAAB . . . ,” “AAABBBAAABBB . . . ,” or “ABCABCABCABC . . . ,” etc.

[0256] The type of modifications contained in the alternating motif may be the same or different. For example, if A, B, C, D each represent one type of modification on the nucleotide, the alternating pattern, i.e., modifications on every other nucleotide, may be the same, but each of the sense strand or antisense strand can be selected from several possibilities of modifications within the alternating motif such as “ABABAB . . . ”, “ACACAC . . . ” “BDBDBD . . . ” or “CDCDCD . . . ,” etc.

[0257] In some embodiments, the dsRNAi agent of the invention comprises the modification pattern for the alternating motif on the sense strand relative to the modification pattern for the alternating motif on the antisense strand is shifted. The shift may be such that the modified group of nucleotides of the sense strand corresponds to a differently modified group of nucleotides of the antisense strand and vice versa. For example, the sense strand when paired with the antisense strand in the dsRNA duplex, the alternating motif in the sense strand may start with “ABABAB” from 5′ to 3′ of the strand and the alternating motif in the antisense strand may start with “BABABA” from 5′ to 3′ of the strand within the duplex region. As another example, the alternating motif in the sense strand may start with “AABBAABB” from 5′ to 3′ of the strand and the alternating motif in the antisense strand may start with “BBAABBAA” from 5′ to 3′ of the strand within the duplex region, so that there is a complete or partial shift of the modification patterns between the sense strand and the antisense strand.

[0258] In some embodiments, the dsRNAi agent comprises the pattern of the alternating motif of 2′-O-methyl modification and 2′-F modification on the sense strand initially has a shift relative to the pattern of the alternating motif of 2′-O-methyl modification and 2′-F modification on the antisense strand initially, i.e., the 2′-O-methyl modified nucleotide on the sense strand base pairs with a 2′-F modified nucleotide on the antisense strand and vice versa. The 1 position of the sense strand may start with the 2′-F modification, and the 1 position of the antisense strand may start with the 2′-O-methyl modification.

[0259] The introduction of one or more motifs of three identical modifications on three consecutive nucleotides to the sense strand or antisense strand interrupts the initial modification pattern present in the sense strand or antisense strand. This interruption of the modification pattern of the sense or antisense strand by introducing one or more motifs of three identical modifications on three consecutive nucleotides to the sense or antisense strand may enhance the gene silencing activity against the target gene.

[0260] In some embodiments, when the motif of three identical modifications on three consecutive nucleotides is introduced to any of the strands, the modification of the nucleotide next to the motif is a different modification than the modification of the motif. For example, the portion of the sequence containing the motif is “ . . . NₐYYYN_{b} . . . ,” where “Y” represents the modification of the motif of three identical modifications on three consecutive nucleotide, and “Nₐ” and “N_{b}” represent a modification to the nucleotide next to the motif “YYY” that is different than the modification of Y, and where Nₐ and N_{b} can be the same or different modifications. Alternatively, Nₐ or N_{b} may be present or absent when there is a wing modification present.

[0261] The iRNA may further comprise at least one phosphorothioate or methylphosphonate internucleotide linkage. The phosphorothioate or methylphosphonate internucleotide linkage modification may occur on any nucleotide of the sense strand, antisense strand, or both strands in any position of the strand. For instance, the internucleotide linkage modification may occur on every nucleotide on the sense strand or antisense strand; each internucleotide linkage modification may occur in an alternating pattern on the sense strand or antisense strand; or the sense strand or antisense strand may contain both internucleotide linkage modifications in an alternating pattern. The alternating pattern of the internucleotide linkage modification on the sense strand may be the same or different from the antisense strand, and the alternating pattern of the internucleotide linkage modification on the sense strand may have a shift relative to the alternating pattern of the internucleotide linkage modification on the antisense strand. In one embodiment, a double-stranded RNAi agent comprises 6-8 phosphorothioate internucleotide linkages. In some embodiments, the antisense strand comprises two phosphorothioate internucleotide linkages at the 5′-end and two phosphorothioate internucleotide linkages at the 3′-end, and the sense strand comprises at least two phosphorothioate internucleotide linkages at either the 5′-end or the 3′-end.

[0262] In some embodiments, the dsRNAi agent comprises a phosphorothioate or methylphosphonate internucleotide linkage modification in the overhang region. For example, the overhang region may contain two nucleotides having a phosphorothioate or methylphosphonate internucleotide linkage between the two nucleotides. Internucleotide linkage modifications also may be made to link the overhang nucleotides with the terminal paired nucleotides within the duplex region. For example, at least 2, 3, 4, or all the overhang nucleotides may be linked through phosphorothioate or methylphosphonate internucleotide linkage, and optionally, there may be additional phosphorothioate or methylphosphonate internucleotide linkages linking the overhang nucleotide with a paired nucleotide that is next to the overhang nucleotide. For instance, there may be at least two phosphorothioate internucleotide linkages between the terminal three nucleotides, in which two of the three nucleotides are overhang nucleotides, and the third is a paired nucleotide next to the overhang nucleotide. These terminal three nucleotides may be at the 3′-end of the antisense strand, the 3′-end of the sense strand, the 5′-end of the antisense strand, or the 5′end of the antisense strand.

[0263] In some embodiments, the 2-nucleotide overhang is at the 3′-end of the antisense strand, and there are two phosphorothioate internucleotide linkages between the terminal three nucleotides, wherein two of the three nucleotides are the overhang nucleotides, and the third nucleotide is a paired nucleotide next to the overhang nucleotide. Optionally, the dsRNAi agent may additionally have two phosphorothioate internucleotide linkages between the terminal three nucleotides at both the 5′-end of the sense strand and at the 5′-end of the antisense strand.

[0264] In one embodiment, the dsRNAi agent comprises mismatch(es) with the target, within the duplex, or combinations thereof. The mismatch may occur in the overhang region or the duplex region. The base pair may be ranked on the basis of their propensity to promote dissociation or melting (e.g., on the free energy of association or dissociation of a particular pairing, the simplest approach is to examine the pairs on an individual pair basis, though next neighbor or similar analysis can also be used). In terms of promoting dissociation: A:U is preferred over G:C; G:U is preferred over G:C; and I:C is preferred over G:C (I=inosine). Mismatches, e.g., non-canonical or other than canonical pairings (as described elsewhere herein) are preferred over canonical (A:T, A:U, G:C) pairings; and pairings which include a universal base are preferred over canonical pairings.

[0265] In certain embodiments, the dsRNAi agent comprises at least one of the first 1, 2, 3, 4, or 5 base pairs within the duplex regions from the 5′-end of the antisense strand independently selected from the group of: A:U, G:U, I:C, and mismatched pairs, e.g., non-canonical or other than canonical pairings or pairings which include a universal base, to promote the dissociation of the antisense strand at the 5′-end of the duplex.

[0266] In certain embodiments, the nucleotide at the 1 position within the duplex region from the 5′-end in the antisense strand is selected from A, dA, dU, U, and dT. Alternatively, at least one of the first 1, 2, or 3 base pair within the duplex region from the 5′-end of the antisense strand is an AU base pair. For example, the first base pair within the duplex region from the 5′-end of the antisense strand is an AU base pair.

[0267] In other embodiments, the nucleotide at the 3′-end of the sense strand is deoxythimidine (dT) or the nucleotide at the 3′-end of the antisense strand is deoxythimidine (dT). For example, there is a short sequence of deoxythimidine nucleotides, for example, two dT nucleotides on the 3′-end of the sense, antisense strand, or both strands.

[0268] In certain embodiments, the sense strand sequence may be represented by formula (I):

5′ nₚ-Nₐ—(X X X)ᵢ—N_{b}—Y Y Y—N_{b}—(Z Z Z)ⱼ—Nₐ-n_{q} 3′ (I)

[0269] wherein:

[0270] i and j are each independently 0 or 1;

[0271] p and q are each independently 0-6;

[0272] each Nₐ independently represents an oligonucleotide sequence comprising 0-25 modified nucleotides, each sequence comprising at least two differently modified nucleotides;

[0273] each N_{b} independently represents an oligonucleotide sequence comprising 0-10 modified nucleotides;

[0274] each nₚ and n_{q} independently represent an overhang nucleotide;

[0275] wherein N_{b} and Y do not have the same modification; and

[0276] XXX, YYY, and ZZZ each independently represent one motif of three identical modifications on three consecutive nucleotides. In one embodiment, YYY is all 2′-F modified nucleotides.

[0277] In some embodiments, the Nₐ or N_{b} comprises modifications of alternating pattern.

[0278] In some embodiments, the YYY motif occurs at or near the cleavage site of the sense strand. For example, when the dsRNAi agent has a duplex region of 17-23 nucleotides in length, the YYY motif can occur at or the vicinity of the cleavage site (e.g.: can occur at positions 6, 7, 8; 7, 8, 9; 8, 9, 10; 9, 10, 11; 10, 11, 12; or 11, 12, 13) of the sense strand, the count starting from the first nucleotide, from the 5′-end; or optionally, the count starting at the first paired nucleotide within the duplex region, from the 5′-end.

[0279] In one embodiment, i is 1 and j is 0, or i is 0 and j is 1, or both i and j are 1. The sense strand can therefore be represented by the following formulas:

5′ nₚ-Nₐ—YYY—N_{b}—ZZZ—Nₐ-n_{q} 3′ (Ib);

5′ nₚ-Nₐ—XXX—N_{b}—YYY—Nₐ-n_{q} 3′ (Ic); or

5′ nₚ-Nₐ—XXX—N_{b}—YYY—N_{b}—ZZZ—Nₐ-n_{q} 3′ (Id).

[0280] When the sense strand is represented by formula (Ib), N_{b} represents an oligonucleotide sequence comprising 0-10, 0-7, 0-5, 0-4, 0-2, or 0 modified nucleotides. Each Nₐ independently can represent an oligonucleotide sequence comprising 2-20, 2-15, or 2-10 modified nucleotides.

[0281] When the sense strand is represented as formula (Ic), N_{b} represents an oligonucleotide sequence comprising 0-10, 0-7, 0-10, 0-7, 0-5, 0-4, 0-2, or 0 modified nucleotides. Each Nₐ can independently represent an oligonucleotide sequence comprising 2-20, 2-15, or 2-10 modified nucleotides.

[0282] When the sense strand is represented as formula (Id), each N_{b} independently represents an oligonucleotide sequence comprising 0-10, 0-7, 0-5, 0-4, 0-2, or 0 modified nucleotides. In one embodiment, N_{b} is 0, 1, 2, 3, 4, 5, or 6 Each Nₐ can independently represent an oligonucleotide sequence comprising 2-20, 2-15, or 2-10 modified nucleotides.

[0283] Each of X, Y and Z may be the same or different from each other.

[0284] In other embodiments, i is 0 and j is 0, and the sense strand may be represented by the formula:

5′ nₚ-Nₐ—YYY—Nₐ-n_{q} 3′ (Ia).

[0285] When the sense strand is represented by formula (Ia), each Nₐ independently can represent an oligonucleotide sequence comprising 2-20, 2-15, or 2-10 modified nucleotides.

[0286] In one embodiment, the antisense strand sequence of the RNAi may be represented by formula (II):

5′ n_{q′}-Nₐ′—(Z′Z′Z′)ₖ—N_{b}′—Y′Y′Y′—N_{b}′—(X′X′X′)ₗ—N′ₐ-nₚ′ 3′ (II)

[0287] wherein:

[0288] k and l are each independently 0 or 1;

[0289] p′ and q′ are each independently 0-6;

[0290] each Nₐ′ independently represents an oligonucleotide sequence comprising 0-25 modified nucleotides, each sequence comprising at least two differently modified nucleotides; each N_{b}′ independently represents an oligonucleotide sequence comprising 0-10 modified nucleotides;

[0291] each nₚ′ and n_{q}′ independently represent an overhang nucleotide;

[0292] wherein N_{b}′ and Y′ do not have the same modification; and

[0293] X′X′X′, Y′Y′Y′, and Z′Z′Z′ each independently represent one motif of three identical modifications on three consecutive nucleotides.

[0294] In some embodiments, the Nₐ′ or N_{b}′ comprises modifications of alternating pattern.

[0295] The Y′Y′Y′ motif occurs at or near the cleavage site of the antisense strand. For example, when the dsRNAi agent has a duplex region of 17-23 nucleotides in length, the Y′Y′Y′ motif can occur at positions 9, 10, 11; 10, 11, 12; 11, 12, 13; 12, 13, 14; or 13, 14, 15 of the antisense strand, with the count starting from the first nucleotide, from the 5′-end; or optionally, the count starting at the first paired nucleotide within the duplex region, from the 5′-end. In one embodiment, the Y′Y′Y′ motif occurs at positions 11, 12, 13.

[0296] In certain embodiments, Y′Y′Y′ motif is all 2′-OMe modified nucleotides.

[0297] In certain embodiments, k is 1 and l is 0, or k is 0 and l is 1, or both k and 1 are 1.

[0298] The antisense strand can therefore be represented by the following formulas:

5′ n_{q′}-Nₐ′—Z′Z′Z′—N_{b}′—Y′Y′Y′—Nₐ′-n_{p′} 3′ (IIb);

5′ n_{q′}-Nₐ′—Y′Y′Y′—N_{b}′—X′X′X′-n_{p′} 3′ (IIc); or

5′ n_{q′}-Nₐ′—Z′Z′Z′—N_{b}′—Y′Y′Y′—N_{b}′—X′X′X′—Nₐ′-n_{p′} 3′ (IId).

[0299] When the antisense strand is represented by formula (IIb), N_{b}′ represents an oligonucleotide sequence comprising 0-10, 0-7, 0-10, 0-7, 0-5, 0-4, 0-2, or 0 modified nucleotides. Each Nₐ′ independently represents an oligonucleotide sequence comprising 2-20, 2-15, or 2-10 modified nucleotides.

[0300] When the antisense strand is represented as formula (IIc), N_{b}′ represents an oligonucleotide sequence comprising 0-10, 0-7, 0-10, 0-7, 0-5, 0-4, 0-2, or 0 modified nucleotides. Each Nₐ′ independently represents an oligonucleotide sequence comprising 2-20, 2-15, or 2-10 modified nucleotides.

[0301] When the antisense strand is represented as formula (IId), each N_{b}′ independently represents an oligonucleotide sequence comprising 0-10, 0-7, 0-10, 0-7, 0-5, 0-4, 0-2, or 0 modified nucleotides. Each Nₐ′ independently represents an oligonucleotide sequence comprising 2-20, 2-15, or 2-10 modified nucleotides. In one embodiment, N_{b} is 0, 1, 2, 3, 4, 5, or 6.

[0302] In other embodiments, k is 0 and l is 0 and the antisense strand may be represented by the formula:

5′ n_{p′}-N_{a′}—Y′Y′Y′—N_{a′}-n_{q′} 3′ (Ia).

[0303] When the antisense strand is represented as formula (IIa), each Nₐ′ independently represents an oligonucleotide sequence comprising 2-20, 2-15, or 2-10 modified nucleotides.

[0304] Each of X′, Y′ and Z′ may be the same or different from each other.

[0305] Each nucleotide of the sense strand and antisense strand may be independently modified with LNA, CRN, UNA, cEt, HNA, CeNA, 2′-methoxyethyl, 2′-O-methyl, 2′-O-allyl, 2′-C-allyl, 2′-hydroxyl, or 2′-fluoro. For example, each nucleotide of the sense strand and antisense strand is independently modified with 2′-O-methyl or 2′-fluoro. Each X, Y, Z, X′, Y′, and Z′, in particular, may represent a 2′-O-methyl modification or a 2′-fluoro modification.

[0306] In some embodiments, the sense strand of the dsRNAi agent may contain YYY motif occurring at 9, 10, and 11 positions of the strand when the duplex region is 21 nt, the count starting from the first nucleotide from the 5′-end, or optionally, the count starting at the first paired nucleotide within the duplex region, from the 5′-end; and Y represents 2′-F modification. The sense strand may additionally contain XXX motif or ZZZ motifs as wing modifications at the opposite end of the duplex region; and XXX and ZZZ each independently represents a 2′-OMe modification or 2′-F modification.

[0307] In some embodiments the antisense strand may contain Y′Y′Y′ motif occurring at positions 11, 12, 13 of the strand, the count starting from the first nucleotide from the 5′-end, or optionally, the count starting at the first paired nucleotide within the duplex region, from the 5′-end; and Y′ represents 2′-O-methyl modification. The antisense strand may additionally contain X′X′X′ motif or Z′Z′Z′ motifs as wing modifications at the opposite end of the duplex region; and X′X′X′ and Z′Z′Z′ each independently represents a 2′-OMe modification or 2′-F modification.

[0308] The sense strand represented by any one of the above formulas (Ia), (Ib), (Ic), and (Id) forms a duplex with an antisense strand being represented by any one of formulas (IIa), (IIb), (IIc), and (IId), respectively.

[0309] Accordingly, the dsRNAi agents for use in the methods of the invention may comprise a sense strand and an antisense strand, each strand having 14 to 30 nucleotides, the iRNA duplex represented by formula (III):

sense: 5′ nₚ-Nₐ—(X X X)ᵢ—N_{b}—Y Y Y—N_{b}—(Z Z Z)ⱼ—Nₐ-n_{q} 3′

antisense: 3′ nₚ′-Nₐ′—(X′X′X′)ₖ—N_{b}′—Y′Y′Y′—N_{b}′—(Z′Z′Z′)ₗ—Nₐ′-n_{q}′ 5′ (III)

[0310] wherein:

[0311] i, j, k, and l are each independently 0 or 1;

[0312] p, p′, q, and q′ are each independently 0-6;

[0313] each Nₐ and Nₐ′ independently represents an oligonucleotide sequence comprising 0-25 modified nucleotides, each sequence comprising at least two differently modified nucleotides;

[0314] each N_{b} and N_{b}′ independently represents an oligonucleotide sequence comprising 0-10 modified nucleotides;

[0315] wherein each nₚ′, nₚ, n_{q}′, and n_{q}, each of which may or may not be present, independently represents an overhang nucleotide; and

[0316] XXX, YYY, ZZZ, X′X′X′, Y′Y′Y′, and Z′Z′Z′ each independently represent one motif of three identical modifications on three consecutive nucleotides.

[0317] In one embodiment, i is 0 and j is 0; or i is 1 and j is 0; or i is 0 and j is 1; or both i and j are 0; or both i and j are 1. In another embodiment, k is 0 and l is 0; or k is 1 and l is 0; k is 0 and l is 1; or both k and 1 are 0; or both k and 1 are 1.

[0318] Exemplary combinations of the sense strand and antisense strand forming an iRNA duplex include the formulas below:

5′ nₚ-Nₐ—Y Y Y—Nₐ-n_{q} 3′

3′ nₚ′-Nₐ′—Y′Y′Y′—Nₐ′n_{q}′ 5′ (IIIa)

5′ nₚ-Nₐ—Y Y Y—N_{b}—Z Z Z—Nₐ-n_{q} 3′

3′ nₚ′-Nₐ′—Y′Y′Y′—N_{b}′—Z′Z′Z′—Nₐ′n_{q}′ 5′ (IIIb)

5′ nₚ-Nₐ—X X X—N_{b}—Y Y Y—Nₐ-n_{q} 3′

3′ nₚ′-Nₐ′—X′X′X′—N_{b}′—Y′Y′Y′—Nₐ′-n_{q}′ 5′ (IIIc)

5′ nₚ-Nₐ—X X X—N_{b}—Y Y Y—N_{b}—Z Z Z—Nₐ-n_{q} 3′

3′ nₚ′-Nₐ′—X′X′X′—N_{b}′—Y′Y′Y′—N_{b}′—Z′Z′Z′—Nₐ-n_{q}′ 5′ (IIId)

[0319] When the dsRNAi agent is represented by formula (IIIa), each Nₐ independently represents an oligonucleotide sequence comprising 2-20, 2-15, or 2-10 modified nucleotides.

[0320] When the dsRNAi agent is represented by formula (IIIb), each N_{b} independently represents an oligonucleotide sequence comprising 1-10, 1-7, 1-5, or 1-4 modified nucleotides. Each Nₐ independently represents an oligonucleotide sequence comprising 2-20, 2-15, or 2-10 modified nucleotides.

[0321] When the dsRNAi agent is represented as formula (IIc), each N_{b}, N_{b}′ independently represents an oligonucleotide sequence comprising 0-10, 0-7, 0-10, 0-7, 0-5, 0-4, 0-2, or 0 modified nucleotides. Each Nₐ independently represents an oligonucleotide sequence comprising 2-20, 2-15, or 2-10 modified nucleotides.

[0322] When the dsRNAi agent is represented as formula (IIId), each N_{b}, N_{b}′ independently represents an oligonucleotide sequence comprising 0-10, 0-7, 0-10, 0-7, 0-5, 0-4, 0-2, or 0 modified nucleotides. Each Nₐ, Nₐ′ independently represents an oligonucleotide sequence comprising 2-20, 2-15, or 2-10 modified nucleotides. Each of Nₐ, Nₐ′, N_{b}, and N_{b}′ independently comprises modifications of alternating pattern.

[0323] Each of X, Y, and Z in formulas (III), (IIIa), (IIIb), (IIIc), and (IIId) may be the same or different from each other.

[0324] When the dsRNAi agent is represented by formula (III), (IIIa), (IIIb), (IIIc), and (IIId), at least one of the Y nucleotides may form a base pair with one of the Y′ nucleotides. Alternatively, at least two of the Y nucleotides form base pairs with the corresponding Y′ nucleotides; or all three of the Y nucleotides all form base pairs with the corresponding Y′ nucleotides.

[0325] When the dsRNAi agent is represented by formula (IIIb) or (IIId), at least one of the Z nucleotides may form a base pair with one of the Z′ nucleotides. Alternatively, at least two of the Z nucleotides form base pairs with the corresponding Z′ nucleotides; or all three of the Z nucleotides all form base pairs with the corresponding Z′ nucleotides.

[0326] When the dsRNAi agent is represented as formula (IIc) or (IIId), at least one of the X nucleotides may form a base pair with one of the X′ nucleotides. Alternatively, at least two of the X nucleotides form base pairs with the corresponding X′ nucleotides; or all three of the X nucleotides all form base pairs with the corresponding X′ nucleotides.

[0327] In certain embodiments, the modification on the Y nucleotide is different than the modification on the Y′ nucleotide, the modification on the Z nucleotide is different than the modification on the Z′ nucleotide, or the modification on the X nucleotide is different than the modification on the X′ nucleotide.

[0328] In certain embodiments, when the dsRNAi agent is represented by formula (IIId), the Nₐ modifications are 2′-O-methyl or 2′-fluoro modifications. In other embodiments, when the RNAi agent is represented by formula (IIId), the Nₐ modifications are 2′-O-methyl or 2′-fluoro modifications and nₚ′>0 and at least one nₚ′ is linked to a neighboring nucleotide a via phosphorothioate linkage. In yet other embodiments, when the RNAi agent is represented by formula (IIId), the Nₐ modifications are 2′-O-methyl or 2′-fluoro modifications, nₚ′>0 and at least one nₚ′ is linked to a neighboring nucleotide via phosphorothioate linkage, and the sense strand is conjugated to one or more GalNAc derivatives attached through a bivalent or trivalent branched linker (described below). In other embodiments, when the RNAi agent is represented by formula (IIId), the Nₐ modifications are 2′-O-methyl or 2′-fluoro modifications, nₚ′>0 and at least one nₚ′ is linked to a neighboring nucleotide via phosphorothioate linkage, the sense strand comprises at least one phosphorothioate linkage, and the sense strand is conjugated to one or more GalNAc derivatives attached through a bivalent or trivalent branched linker.

[0329] In some embodiments, when the dsRNAi agent is represented by formula (IIIa), the Nₐ modifications are 2′-O-methyl or 2′-fluoro modifications, nₚ′>0 and at least one nₚ′ is linked to a neighboring nucleotide via phosphorothioate linkage, the sense strand comprises at least one phosphorothioate linkage, and the sense strand is conjugated to one or more GalNAc derivatives attached through a bivalent or trivalent branched linker.

[0330] In some embodiments, the dsRNAi agent is a multimer containing at least two duplexes represented by formula (III), (IIIa), (IIIb), (IIIc), and (IIId), wherein the duplexes are connected by a linker. The linker can be cleavable or non-cleavable. Optionally, the multimer further comprises a ligand. Each of the duplexes can target the same gene or two different genes; or each of the duplexes can target same gene at two different target sites.

[0331] In some embodiments, the dsRNAi agent is a multimer containing three, four, five, six, or more duplexes represented by formula (III), (IIIa), (IIIb), (IIc), and (IIId), wherein the duplexes are connected by a linker. The linker can be cleavable or non-cleavable. Optionally, the multimer further comprises a ligand. Each of the duplexes can target the same gene or two different genes; or each of the duplexes can target same gene at two different target sites.

[0332] In one embodiment, two dsRNAi agents represented by at least one of formulas (III), (IIIa), (IIIb), (IIIc), and (IIId) are linked to each other at the 5′ end, and one or both of the 3′ ends, and are optionally conjugated to a ligand. Each of the agents can target the same gene or two different genes; or each of the agents can target same gene at two different target sites.

[0333] In certain embodiments, an RNAi agent of the invention may contain a low number of nucleotides containing a 2′-fluoro modification, e.g., 10 or fewer nucleotides with 2′-fluoro modification. For example, the RNAi agent may contain 10, 9, 8, 7, 6, 5, 4, 3, 2, 1 or 0 nucleotides with a 2′-fluoro modification. In a specific embodiment, the RNAi agent of the invention contains 10 nucleotides with a 2′-fluoro modification, e.g., 4 nucleotides with a 2′-fluoro modification in the sense strand and 6 nucleotides with a 2′-fluoro modification in the antisense strand. In another specific embodiment, the RNAi agent of the invention contains 6 nucleotides with a 2′-fluoro modification, e.g., 4 nucleotides with a 2′-fluoro modification in the sense strand and 2 nucleotides with a 2′-fluoro modification in the antisense strand.

[0334] In other embodiments, an RNAi agent of the invention may contain an ultra low number of nucleotides containing a 2′-fluoro modification, e.g., 2 or fewer nucleotides containing a 2′-fluoro modification. For example, the RNAi agent may contain 2, 1 of 0 nucleotides with a 2′-fluoro modification. In a specific embodiment, the RNAi agent may contain 2 nucleotides with a 2′-fluoro modification, e.g., 0 nucleotides with a 2-fluoro modification in the sense strand and 2 nucleotides with a 2′-fluoro modification in the antisense strand.

[0335] Various publications describe multimeric iRNAs that can be used in the methods of the invention. Such publications include WO2007/091269, U.S. Pat. No. 7,858,769, WO2010/141511, WO2007/117686, WO2009/014887, and WO2011/031520 the entire contents of each of which are hereby incorporated herein by reference.

[0336] In certain embodiments, the compositions and methods of the disclosure include a vinyl phosphonate (VP) modification of an RNAi agent as described herein. In exemplary embodiments, a 5′ vinyl phosphonate modified nucleotide of the disclosure has the structure:

[chemical structure]

wherein X is O or S;

[0337] R is hydrogen, hydroxy, fluoro, or C₁₋₂₀alkoxy (e.g., methoxy or n-hexadecyloxy);

[0338] R^{5′} is ═C(H)—P(O)(OH)₂ and the double bond between the C5′ carbon and R^{5′} is in the E or Z orientation (e.g., E orientation); and

[0339] B is a nucleobase or a modified nucleobase, optionally where B is adenine, guanine, cytosine, thymine, or uracil.

[0340] A vinyl phosphonate of the instant disclosure may be attached to either the antisense or the sense strand of a dsRNA of the disclosure. In certain embodiments, a vinyl phosphonate of the instant disclosure is attached to the antisense strand of a dsRNA, optionally at the 5′ end of the antisense strand of the dsRNA.

[0341] Vinyl phosphonate modifications are also contemplated for the compositions and methods of the instant disclosure. An exemplary vinyl phosphonate structure includes the preceding structure, where R5′ is ═C(H)—OP(O)(OH)2 and the double bond between the C5′ carbon and R5′ is in the E or Z orientation (e.g., E orientation).

[0342] As described in more detail below, the iRNA that contains conjugations of one or more carbohydrate moieties to an iRNA can optimize one or more properties of the iRNA. In many cases, the carbohydrate moiety will be attached to a modified subunit of the iRNA. For example, the ribose sugar of one or more ribonucleotide subunits of a iRNA can be replaced with another moiety, e.g., a non-carbohydrate (such as, cyclic) carrier to which is attached a carbohydrate ligand. A ribonucleotide subunit in which the ribose sugar of the subunit has been so replaced is referred to herein as a ribose replacement modification subunit (RRMS). A cyclic carrier may be a carbocyclic ring system, i.e., all ring atoms are carbon atoms, or a heterocyclic ring system, i.e., one or more ring atoms may be a heteroatom, e.g., nitrogen, oxygen, sulfur. The cyclic carrier may be a monocyclic ring system, or may contain two or more rings, e.g. fused rings. The cyclic carrier may be a fully saturated ring system, or it may contain one or more double bonds.

[0343] The ligand may be attached to the polynucleotide via a carrier. The carriers include (i) at least one “backbone attachment point,” such as, two “backbone attachment points” and (ii) at least one “tethering attachment point.” A “backbone attachment point” as used herein refers to a functional group, e.g. a hydroxyl group, or generally, a bond available for, and that is suitable for incorporation of the carrier into the backbone, e.g., the phosphate, or modified phosphate, e.g., sulfur containing, backbone, of a ribonucleic acid. A “tethering attachment point” (TAP) in some embodiments refers to a constituent ring atom of the cyclic carrier, e.g., a carbon atom or a heteroatom (distinct from an atom which provides a backbone attachment point), that connects a selected moiety. The moiety can be, e.g., a carbohydrate, e.g. monosaccharide, disaccharide, trisaccharide, tetrasaccharide, oligosaccharide, or polysaccharide. Optionally, the selected moiety is connected by an intervening tether to the cyclic carrier. Thus, the cyclic carrier will often include a functional group, e.g., an amino group, or generally, provide a bond, that is suitable for incorporation or tethering of another chemical entity, e.g., a ligand to the constituent ring.

[0344] The iRNA may be conjugated to a ligand via a carrier, wherein the carrier can be cyclic group or acyclic group. In one embodiment, the cyclic group is selected from pyrrolidinyl, pyrazolinyl, pyrazolidinyl, imidazolinyl, imidazolidinyl, piperidinyl, piperazinyl, [1,3]dioxolane, oxazolidinyl, isoxazolidinyl, morpholinyl, thiazolidinyl, isothiazolidinyl, quinoxalinyl, pyridazinonyl, tetrahydrofuryl, and decalin. In one embodiment, the acyclic group is a serinol backbone or diethanolamine backbone.

[0345] i. Thermally Destabilizing Modifications

[0346] In certain embodiments, a dsRNA molecule can be optimized for RNA interference by incorporating thermally destabilizing modifications in the seed region of the antisense strand. As used herein “seed region” means at positions 2-9 of the 5′-end of the referenced strand. For example, thermally destabilizing modifications can be incorporated in the seed region of the antisense strand to reduce or inhibit off-target gene silencing.

[0347] The term “thermally destabilizing modification(s)” includes modification(s) that would result with a dsRNA with a lower overall melting temperature (Tₘ) than the Tₘ of the dsRNA without having such modification(s). For example, the thermally destabilizing modification(s) can decrease the Tₘ of the dsRNA by 1-4° C., such as one, two, three or four degrees Celcius. And, the term “thermally destabilizing nucleotide” refers to a nucleotide containing one or more thermally destabilizing modifications.

[0348] It has been discovered that dsRNAs with an antisense strand comprising at least one thermally destabilizing modification of the duplex within the first 9 nucleotide positions, counting from the 5′ end, of the antisense strand have reduced off-target gene silencing activity. Accordingly, in some embodiments, the antisense strand comprises at least one (e.g., one, two, three, four, five or more) thermally destabilizing modification of the duplex within the first 9 nucleotide positions of the 5′ region of the antisense strand. In some embodiments, one or more thermally destabilizing modification(s) of the duplex is/are located in positions 2-9, such as, positions 4-8, from the 5′-end of the antisense strand. In some further embodiments, the thermally destabilizing modification(s) of the duplex is/are located at position 6, 7 or 8 from the 5′-end of the antisense strand. In still some further embodiments, the thermally destabilizing modification of the duplex is located at position 7 from the 5′-end of the antisense strand. In some embodiments, the thermally destabilizing modification of the duplex is located at position 2, 3, 4, 5 or 9 from the 5′-end of the antisense strand.

[0349] An iRNA agent comprises a sense strand and an antisense strand, each strand having 14 to 40 nucleotides. The RNAi agent may be represented by formula (L):

[chemical structure]

In formula (L), B1, B2, B3, B1′, B2′, B3′, and B4′ each are independently a nucleotide containing a modification selected from the group consisting of 2′-O-alkyl, 2′-substituted alkoxy, 2′-substituted alkyl, 2′-halo, ENA, and BNA/LNA. In one embodiment, B1, B2, B3, B1′, B2′, B3′, and B4′ each contain 2′-OMe modifications. In one embodiment, B1, B2, B3, B1′, B2′, B3′, and B4′ each contain 2′-OMe or 2′-F modifications. In one embodiment, at least one of B1, B2, B3, B1′, B2′, B3′, and B4′ contain 2′-O—N-methylacetamido (2′-O-NMA, 2′O—CH2C(O)N(Me)H) modification.

[0350] C1 is a thermally destabilizing nucleotide placed at a site opposite to the seed region of the antisense strand (i.e., at positions 2-8 of the 5′-end of the antisense strand). For example, C1 is at a position of the sense strand that pairs with a nucleotide at positions 2-8 of the 5′-end of the antisense strand. In one example, C1 is at position 15 from the 5′-end of the sense strand. C1 nucleotide bears the thermally destabilizing modification which can include abasic modification; mismatch with the opposing nucleotide in the duplex; and sugar modification such as 2′-deoxy modification or acyclic nucleotide e.g., unlocked nucleic acids (UNA) or glycerol nucleic acid (GNA). In one embodiment, C1 has thermally destabilizing modification selected from the group consisting of: i) mismatch with the opposing nucleotide in the antisense strand; ii) abasic modification selected from the group consisting of:

[chemical structure]

and iii) sugar modification selected from the group consisting of:

[chemical structure]

wherein B is a modified or unmodified nucleobase, R¹ and R² independently are H, halogen, OR₃, or alkyl; and R₃ is H, alkyl, cycloalkyl, aryl, aralkyl, heteroaryl or sugar. In one embodiment, the thermally destabilizing modification in C1 is a mismatch selected from the group consisting of G:G, G:A, G:U, G:T, A:A, A:C, C:C, C:U, C:T, U:U, T:T, and U:T; and optionally, at least one nucleobase in the mismatch pair is a 2′-deoxy nucleobase. In one example, the thermally destabilizing modification in C1 is GNA or

[chemical structure]

T1, T1′, T2′, and T3′ each independently represent a nucleotide comprising a modification providing the nucleotide a steric bulk that is less or equal to the steric bulk of a 2′-OMe modification. A steric bulk refers to the sum of steric effects of a modification. Methods for determining steric effects of a modification of a nucleotide are known to one skilled in the art. The modification can be at the 2′ position of a ribose sugar of the nucleotide, or a modification to a non-ribose nucleotide, acyclic nucleotide, or the backbone of the nucleotide that is similar or equivalent to the 2′ position of the ribose sugar, and provides the nucleotide a steric bulk that is less than or equal to the steric bulk of a 2′-OMe modification. For example, T1, T1′, T2′, and T3′ are each independently selected from DNA, RNA, LNA, 2′-F, and 2′-F-5′-methyl. In one embodiment, T1 is DNA. In one embodiment, T1′ is DNA, RNA or LNA. In one embodiment, T2′ is DNA or RNA. In one embodiment, T3′ is DNA or RNA.
n¹, n³, and q¹ are independently 4 to 15 nucleotides in length.
n⁵, q³, and q⁷ are independently 1-6 nucleotide(s) in length.
n⁴, q², and q⁶ are independently 1-3 nucleotide(s) in length; alternatively, n⁴ is 0.
q⁵ is independently 0-10 nucleotide(s) in length.
n² and q⁴ are independently 0-3 nucleotide(s) in length.

[0351] Alternatively, n⁴ is 0-3 nucleotide(s) in length.

[0352] In one embodiment, n⁴ can be 0. In one example, n⁴ is 0, and q² and q⁶ are 1. In another example, n⁴ is 0, and q² and q⁶ are 1, with two phosphorothioate internucleotide linkage modifications within position 1-5 of the sense strand (counting from the 5′-end of the sense strand), and two phosphorothioate internucleotide linkage modifications at positions 1 and 2 and two phosphorothioate internucleotide linkage modifications within positions 18-23 of the antisense strand (counting from the 5′-end of the antisense strand).

[0353] In one embodiment, n⁴, q², and q⁶ are each 1.

[0354] In one embodiment, n², n⁴, q², q⁴, and q⁶ are each 1.

[0355] In one embodiment, C1 is at position 14-17 of the 5′-end of the sense strand, when the sense strand is 19-22 nucleotides in length, and n⁴ is 1. In one embodiment, C1 is at position 15 of the 5′-end of the sense strand

[0356] In one embodiment, T3′ starts at position 2 from the 5′ end of the antisense strand. In one example, T3′ is at position 2 from the 5′ end of the antisense strand and q⁶ is equal to 1.

[0357] In one embodiment, T1′ starts at position 14 from the 5′ end of the antisense strand. In one example, T1′ is at position 14 from the 5′ end of the antisense strand and q² is equal to 1.

[0358] In an exemplary embodiment, T3′ starts from position 2 from the 5′ end of the antisense strand and T1′ starts from position 14 from the 5′ end of the antisense strand. In one example, T3′ starts from position 2 from the 5′ end of the antisense strand and q⁶ is equal to 1 and T1′ starts from position 14 from the 5′ end of the antisense strand and q² is equal to 1.

[0359] In one embodiment, T1′ and T3′ are separated by 11 nucleotides in length (i.e. not counting the T1′ and T3′ nucleotides).

[0360] In one embodiment, T1′ is at position 14 from the 5′ end of the antisense strand. In one example, T1′ is at position 14 from the 5′ end of the antisense strand and q² is equal to 1, and the modification at the 2′ position or positions in a non-ribose, acyclic or backbone that provide less steric bulk than a 2′-OMe ribose.

[0361] In one embodiment, T3′ is at position 2 from the 5′ end of the antisense strand. In one example, T3′ is at position 2 from the 5′ end of the antisense strand and q⁶ is equal to 1, and the modification at the 2′ position or positions in a non-ribose, acyclic or backbone that provide less than or equal to steric bulk than a 2′-OMe ribose.

[0362] In one embodiment, T1 is at the cleavage site of the sense strand. In one example, T1 is at position 11 from the 5′ end of the sense strand, when the sense strand is 19-22 nucleotides in length, and n² is 1. In an exemplary embodiment, T1 is at the cleavage site of the sense strand at position 11 from the 5′ end of the sense strand, when the sense strand is 19-22 nucleotides in length, and n² is 1, In one embodiment, T2′ starts at position 6 from the 5′ end of the antisense strand. In one example, T2′ is at positions 6-10 from the 5′ end of the antisense strand, and q⁴ is 1.

[0363] In an exemplary embodiment, T1 is at the cleavage site of the sense strand, for instance, at position 11 from the 5′ end of the sense strand, when the sense strand is 19-22 nucleotides in length, and n² is 1; T1′ is at position 14 from the 5′ end of the antisense strand, and q² is equal to 1, and the modification to T1′ is at the 2′ position of a ribose sugar or at positions in a non-ribose, acyclic or backbone that provide less steric bulk than a 2′-OMe ribose; T2′ is at positions 6-10 from the 5′ end of the antisense strand, and q⁴ is 1; and T3′ is at position 2 from the 5′ end of the antisense strand, and q⁶ is equal to 1, and the modification to T3′ is at the 2′ position or at positions in a non-ribose, acyclic or backbone that provide less than or equal to steric bulk than a 2′-OMe ribose.

[0364] In one embodiment, T2′ starts at position 8 from the 5′ end of the antisense strand. In one example, T2′ starts at position 8 from the 5′ end of the antisense strand, and q⁴ is 2.

[0365] In one embodiment, T2′ starts at position 9 from the 5′ end of the antisense strand. In one example, T2′ is at position 9 from the 5′ end of the antisense strand, and q⁴ is 1.

[0366] In one embodiment, B1′ is 2′-OMe or 2′-F, q¹ is 9, T1′ is 2′-F, q² is 1, B2′ is 2′-OMe or 2′-F, q³ is 4, T2′ is 2′-F, q⁴ is 1, B3′ is 2′-OMe or 2′-F, q⁵ is 6, T3′ is 2′-F, q⁶ is 1, B4′ is 2′-OMe, and q⁷ is 1; with two phosphorothioate internucleotide linkage modifications within positions 1-5 of the sense strand (counting from the 5′-end of the sense strand), and two phosphorothioate internucleotide linkage modifications at positions 1 and 2 and two phosphorothioate internucleotide linkage modifications within positions 18-23 of the antisense strand (counting from the 5′-end of the antisense strand).

[0367] In one embodiment, n⁴ is 0, B3 is 2′-OMe, n⁵ is 3, B1′ is 2′-OMe or 2′-F, q¹ is 9, T1′ is 2′-F, q² is 1, B2′ is 2′-OMe or 2′-F, q³ is 4, T2′ is 2′-F, q⁴ is 1, B3′ is 2′-OMe or 2′-F, q⁵ is 6, T3′ is 2′-F, q⁶ is 1, B4′ is 2′-OMe, and q⁷ is 1; with two phosphorothioate internucleotide linkage modifications within positions 1-5 of the sense strand (counting from the 5′-end of the sense strand), and two phosphorothioate internucleotide linkage modifications at positions 1 and 2 and two phosphorothioate internucleotide linkage modifications within positions 18-23 of the antisense strand (counting from the 5′-end of the antisense strand).

[0368] In one embodiment, B1 is 2′-OMe or 2′-F, n¹ is 8, T1 is 2′F, n² is 3, B2 is 2′-OMe, n³ is 7, n⁴ is 0, B3 is 2′OMe, n⁵ is 3, B1′ is 2′-OMe or 2′-F, q¹ is 9, T1′ is 2′-F, q² is 1, B2′ is 2′-OMe or 2′-F, q³ is 4, T2′ is 2′-F, q⁴ is 2, B3′ is 2′-OMe or 2′-F, q⁵ is 5, T3′ is 2′-F, q⁶ is 1, B4′ is 2′-OMe, and q⁷ is 1.

[0369] In one embodiment, B1 is 2′-OMe or 2′-F, n¹ is 8, T1 is 2′F, n² is 3, B2 is 2′-OMe, n³ is 7, n⁴ is 0, B3 is 2′-OMe, n⁵ is 3, B1′ is 2′-OMe or 2′-F, q¹ is 9, T1′ is 2′-F, q² is 1, B2′ is 2′-OMe or 2′-F, q³ is 4, T2′ is 2′-F, q⁴ is 2, B3′ is 2′-OMe or 2′-F, q⁵ is 5, T3′ is 2′-F, q⁶ is 1, B4′ is 2′-OMe, and q⁷ is 1; with two phosphorothioate internucleotide linkage modifications within positions 1-5 of the sense strand (counting from the 5′-end of the sense strand), and two phosphorothioate internucleotide linkage modifications at positions 1 and 2 and two phosphorothioate internucleotide linkage modifications within positions 18-23 of the antisense strand (counting from the 5′-end of the antisense strand).

[0370] In one embodiment, B1 is 2′-OMe or 2′-F, n¹ is 6, T1 is 2′F, n² is 3, B2 is 2′-OMe, n³ is 7, n⁴ is 0, B3 is 2′OMe, n⁵ is 3, B1′ is 2′-OMe or 2′-F, q¹ is 7, T1′ is 2′-F, q² is 1, B2′ is 2′-OMe or 2′-F, q³ is 4, T2′ is 2′-F, q⁴ is 2, B3′ is 2′-OMe or 2′-F, q⁵ is 5, T3′ is 2′-F, q⁶ is 1, B4′ is 2′-OMe, and q⁷ is 1.

[0371] In one embodiment, B1 is 2′-OMe or 2′-F, n¹ is 6, T1 is 2′F, n² is 3, B2 is 2′-OMe, n³ is 7, n⁴ is 0, B3 is 2′-OMe, n⁵ is 3, B1′ is 2′-OMe or 2′-F, q¹ is 7, T1′ is 2′-F, q² is 1, B2′ is 2′-OMe or 2′-F, q³ is 4, T2′ is 2′-F, q⁴ is 2, B3′ is 2′-OMe or 2′-F, q⁵ is 5, T3′ is 2′-F, q⁶ is 1, B4′ is 2′-OMe, and q⁷ is 1; with two phosphorothioate internucleotide linkage modifications within positions 1-5 of the sense strand (counting from the 5′-end of the sense strand), and two phosphorothioate internucleotide linkage modifications at positions 1 and 2 and two phosphorothioate internucleotide linkage modifications within positions 18-23 of the antisense strand (counting from the 5′-end of the antisense strand).

[0372] In one embodiment, B1 is 2′-OMe or 2′-F, n¹ is 8, T1 is 2′F, n² is 3, B2 is 2′-OMe, n³ is 7, n⁴ is 0, B3 is 2′OMe, n⁵ is 3, B1′ is 2′-OMe or 2′-F, q¹ is 9, T1′ is 2′-F, q² is 1, B2′ is 2′-OMe or 2′-F, q³ is 4, T2′ is 2′-F, q⁴ is 1, B3′ is 2′-OMe or 2′-F, q⁵ is 6, T3′ is 2′-F, q⁶ is 1, B4′ is 2′-OMe, and q⁷ is 1.

[0373] In one embodiment, B1 is 2′-OMe or 2′-F, n¹ is 8, T1 is 2′F, n² is 3, B2 is 2′-OMe, n³ is 7, n⁴ is 0, B3 is 2′-OMe, n⁵ is 3, B1′ is 2′-OMe or 2′-F, q¹ is 9, T1′ is 2′-F, q² is 1, B2′ is 2′-OMe or 2′-F, q³ is 4, T2′ is 2′-F, q⁴ is 1, B3′ is 2′-OMe or 2′-F, q⁵ is 6, T3′ is 2′-F, q⁶ is 1, B4′ is 2′-OMe, and q⁷ is 1; with two phosphorothioate internucleotide linkage modifications within positions 1-5 of the sense strand (counting from the 5′-end of the sense strand), and two phosphorothioate internucleotide linkage modifications at positions 1 and 2 and two phosphorothioate internucleotide linkage modifications within positions 18-23 of the antisense strand (counting from the 5′-end of the antisense strand).

[0374] In one embodiment, B1 is 2′-OMe or 2′-F, n¹ is 8, T1 is 2′F, n² is 3, B2 is 2′-OMe, n³ is 7, n⁴ is 0, B3 is 2′OMe, n⁵ is 3, B1′ is 2′-OMe or 2′-F, q¹ is 9, T1′ is 2′-F, q² is 1, B2′ is 2′-OMe or 2′-F, q³ is 5, T2′ is 2′-F, q⁴ is 1, B3′ is 2′-OMe or 2′-F, q⁵ is 5, T3′ is 2′-F, q⁶ is 1, B4′ is 2′-OMe, and q⁷ is 1; optionally with at least 2 additional TT at the 3′-end of the antisense strand.

[0375] In one embodiment, B1 is 2′-OMe or 2′-F, n¹ is 8, T1 is 2′F, n² is 3, B2 is 2′-OMe, n³ is 7, n⁴ is 0, B3 is 2′-OMe, n⁵ is 3, B1′ is 2′-OMe or 2′-F, q¹ is 9, T1′ is 2′-F, q² is 1, B2′ is 2′-OMe or 2′-F, q³ is 5, T2′ is 2′-F, q⁴ is 1, B3′ is 2′-OMe or 2′-F, q⁵ is 5, T3′ is 2′-F, q⁶ is 1, B4′ is 2′-OMe, and q⁷ is 1; optionally with at least 2 additional TT at the 3′-end of the antisense strand; with two phosphorothioate internucleotide linkage modifications within positions 1-5 of the sense strand (counting from the 5′-end of the sense strand), and two phosphorothioate internucleotide linkage modifications at positions 1 and 2 and two phosphorothioate internucleotide linkage modifications within positions 18-23 of the antisense strand (counting from the 5′-end of the antisense strand).

[0376] In one embodiment, B1 is 2′-OMe or 2′-F, n¹ is 8, T1 is 2′F, n² is 3, B2 is 2′-OMe, n³ is 7, n⁴ is 0, B3 is 2′-OMe, n⁵ is 3, B1′ is 2′-OMe or 2′-F, q¹ is 9, T1′ is 2′-F, q² is 1, B2′ is 2′-OMe or 2′-F, q³ is 4, q⁴ is 0, B3′ is 2′-OMe or 2′-F, q⁵ is 7, T3′ is 2′-F, q⁶ is 1, B4′ is 2′-OMe, and q⁷ is 1. In one embodiment, B1 is 2′-OMe or 2′-F, n¹ is 8, T1 is 2′F, n² is 3, B2 is 2′-OMe, n³ is 7, n⁴ is 0, B3 is 2′-OMe, n⁵ is 3, B1′ is 2′-OMe or 2′-F, q¹ is 9, T1′ is 2′-F, q² is 1, B2′ is 2′-OMe or 2′-F, q³ is 4, q⁴ is 0, B3′ is 2′-OMe or 2′-F, q⁵ is 7, T3′ is 2′-F, q⁶ is 1, B4′ is 2′-OMe, and q⁷ is 1; with two phosphorothioate internucleotide linkage modifications within positions 1-5 of the sense strand (counting from the 5′-end), and two phosphorothioate internucleotide linkage modifications at positions 1 and 2 and two phosphorothioate internucleotide linkage modifications within positions 18-23 of the antisense strand (counting from the 5′-end).

[0377] In one embodiment, B1 is 2′-OMe or 2′-F, n¹ is 8, T1 is 2′F, n² is 3, B2 is 2′-OMe, n³ is 7, n⁴ is 0, B3 is 2′OMe, n⁵ is 3, B1′ is 2′-OMe or 2′-F, q¹ is 9, T1′ is 2′-F, q² is 1, B2′ is 2′-OMe or 2′-F, q³ is 4, T2′ is 2′-F, q⁴ is 2, B3′ is 2′-OMe or 2′-F, q⁵ is 5, T3′ is 2′-F, q⁶ is 1, B4′ is 2′-F, and q⁷ is 1.

[0378] In one embodiment, B1 is 2′-OMe or 2′-F, n¹ is 8, T1 is 2′F, n² is 3, B2 is 2′-OMe, n³ is 7, n⁴ is 0, B3 is 2′-OMe, n⁵ is 3, B1′ is 2′-OMe or 2′-F, q¹ is 9, T1′ is 2′-F, q² is 1, B2′ is 2′-OMe or 2′-F, q³ is 4, T2′ is 2′-F, q⁴ is 2, B3′ is 2′-OMe or 2′-F, q⁵ is 5, T3′ is 2′-F, q⁶ is 1, B4′ is 2′-F, and q⁷ is 1; with two phosphorothioate internucleotide linkage modifications within positions 1-5 of the sense strand (counting from the 5′-end of the sense strand), and two phosphorothioate internucleotide linkage modifications at positions 1 and 2 and two phosphorothioate internucleotide linkage modifications within positions 18-23 of the antisense strand (counting from the 5′-end of the antisense strand).

[0379] In one embodiment, B1 is 2′-OMe or 2′-F, n¹ is 8, T1 is 2′F, n² is 3, B2 is 2′-OMe, n³ is 7, n⁴ is 0, B3 is 2′-OMe, n⁵ is 3, B1′ is 2′-OMe or 2′-F, q¹ is 9, T1′ is 2′-F, q² is 1, B2′ is 2′-OMe or 2′-F, q³ is 4, q⁴ is 0, B3′ is 2′-OMe or 2′-F, q⁵ is 7, T3′ is 2′-F, q⁶ is 1, B4′ is 2′-F, and q⁷ is 1. In one embodiment, B1 is 2′-OMe or 2′-F, n¹ is 8, T1 is 2′F, n² is 3, B2 is 2′-OMe, n³ is 7, n⁴ is 0, B3 is 2′-OMe, n⁵ is 3, B1′ is 2′-OMe or 2′-F, q¹ is 9, T1′ is 2′-F, q² is 1, B2′ is 2′-OMe or 2′-F, q³ is 4, q⁴ is 0, B3′ is 2′-OMe or 2′-F, q⁵ is 7, T3′ is 2′-F, q⁶ is 1, B4′ is 2′-F, and q⁷ is 1; with two phosphorothioate internucleotide linkage modifications within positions 1-5 of the sense strand (counting from the 5′-end of the sense strand), and two phosphorothioate internucleotide linkage modifications at positions 1 and 2 and two phosphorothioate internucleotide linkage modifications within positions 18-23 of the antisense strand (counting from the 5′-end of the antisense strand).

[0380] The RNAi agent can comprise a phosphorus-containing group at the 5′-end of the sense strand or antisense strand. The 5′-end phosphorus-containing group can be 5′-end phosphate (5′-P), 5′-end phosphorothioate (5′-PS), 5′-end phosphorodithioate (5′-PS₂), 5′-end vinylphosphonate (5′-VP), 5′-end methylphosphonate (MePhos), or 5′-deoxy-5′-C-malonyl

[chemical structure]

When the 5′-end phosphorus-containing group is 5′-end vinylphosphonate (5′-VP), the 5′-VP can be either 5′-E-VP isomer (i.e., trans-vinylphosphonate,

[chemical structure]

5′-Z-VP isomer (i.e., cis-vinylphosphonate,

[chemical structure]

or mixtures thereof.
In one embodiment, the RNAi agent comprises a phosphorus-containing group at the 5′-end of the sense strand. In one embodiment, the RNAi agent comprises a phosphorus-containing group at the 5′-end of the antisense strand.

[0381] In one embodiment, the RNAi agent comprises a 5′-P. In one embodiment, the RNAi agent comprises a 5′-P in the antisense strand.

[0382] In one embodiment, the RNAi agent comprises a 5′-PS. In one embodiment, the RNAi agent comprises a 5′-PS in the antisense strand.

[0383] In one embodiment, the RNAi agent comprises a 5′-VP. In one embodiment, the RNAi agent comprises a 5′-VP in the antisense strand. In one embodiment, the RNAi agent comprises a 5′-E-VP in the antisense strand. In one embodiment, the RNAi agent comprises a 5′-Z-VP in the antisense strand.

[0384] In one embodiment, the RNAi agent comprises a 5′-PS₂. In one embodiment, the RNAi agent comprises a 5′-PS₂ in the antisense strand.

[0385] In one embodiment, the RNAi agent comprises a 5′-PS₂. In one embodiment, the RNAi agent comprises a 5′-deoxy-5′-C-malonyl in the antisense strand.

[0386] In one embodiment, B1 is 2′-OMe or 2′-F, n¹ is 8, T1 is 2′F, n² is 3, B2 is 2′-OMe, n³ is 7, n⁴ is 0, B3 is 2′OMe, n⁵ is 3, B1′ is 2′-OMe or 2′-F, q¹ is 9, T1′ is 2′-F, q² is 1, B2′ is 2′-OMe or 2′-F, q³ is 4, T2′ is 2′-F, q⁴ is 2, B3′ is 2′-OMe or 2′-F, q⁵ is 5, T3′ is 2′-F, q⁶ is 1, B4′ is 2′-OMe, and q⁷ is 1. The RNAi agent also comprises a 5′-PS.

[0387] In one embodiment, B1 is 2′-OMe or 2′-F, n¹ is 8, T1 is 2′F, n² is 3, B2 is 2′-OMe, n³ is 7, n⁴ is 0, B3 is 2′OMe, n⁵ is 3, B1′ is 2′-OMe or 2′-F, q¹ is 9, T1′ is 2′-F, q² is 1, B2′ is 2′-OMe or 2′-F, q³ is 4, T2′ is 2′-F, q⁴ is 2, B3′ is 2′-OMe or 2′-F, q⁵ is 5, T3′ is 2′-F, q⁶ is 1, B4′ is 2′-OMe, and q⁷ is 1. The RNAi agent also comprises a 5′-P.

[0388] In one embodiment, B1 is 2′-OMe or 2′-F, n¹ is 8, T1 is 2′F, n² is 3, B2 is 2′-OMe, n³ is 7, n⁴ is 0, B3 is 2′OMe, n⁵ is 3, B1′ is 2′-OMe or 2′-F, q¹ is 9, T1′ is 2′-F, q² is 1, B2′ is 2′-OMe or 2′-F, q³ is 4, T2′ is 2′-F, q⁴ is 2, B3′ is 2′-OMe or 2′-F, q⁵ is 5, T3′ is 2′-F, q⁶ is 1, B4′ is 2′-OMe, and q⁷ is 1. The RNAi agent also comprises a 5′-VP. The 5′-VP may be 5′-E-VP, 5′-Z-VP, or combination thereof.

[0389] In one embodiment, B1 is 2′-OMe or 2′-F, n¹ is 8, T1 is 2′F, n² is 3, B2 is 2′-OMe, n³ is 7, n⁴ is 0, B3 is 2′OMe, n⁵ is 3, B1′ is 2′-OMe or 2′-F, q¹ is 9, T1′ is 2′-F, q² is 1, B2′ is 2′-OMe or 2′-F, q³ is 4, T2′ is 2′-F, q⁴ is 2, B3′ is 2′-OMe or 2′-F, q⁵ is 5, T3′ is 2′-F, q⁶ is 1, B4′ is 2′-OMe, and q⁷ is 1. The RNAi agent also comprises a 5′-PS₂.

[0390] In one embodiment, B1 is 2′-OMe or 2′-F, n¹ is 8, T1 is 2′F, n² is 3, B2 is 2′-OMe, n³ is 7, n⁴ is 0, B3 is 2′OMe, n⁵ is 3, B1′ is 2′-OMe or 2′-F, q¹ is 9, T1′ is 2′-F, q² is 1, B2′ is 2′-OMe or 2′-F, q³ is 4, T2′ is 2′-F, q⁴ is 2, B3′ is 2′-OMe or 2′-F, q⁵ is 5, T3′ is 2′-F, q⁶ is 1, B4′ is 2′-OMe, and q⁷ is 1. The RNAi agent also comprises a 5′-deoxy-5′-C-malonyl.

[0391] In one embodiment, B1 is 2′-OMe or 2′-F, n¹ is 8, T1 is 2′F, n² is 3, B2 is 2′-OMe, n³ is 7, n⁴ is 0, B3 is 2′-OMe, n⁵ is 3, B1′ is 2′-OMe or 2′-F, q¹ is 9, T1′ is 2′-F, q² is 1, B2′ is 2′-OMe or 2′-F, q³ is 4, T2′ is 2′-F, q⁴ is 2, B3′ is 2′-OMe or 2′-F, q⁵ is 5, T3′ is 2′-F, q⁶ is 1, B4′ is 2′-OMe, and q⁷ is 1; with two phosphorothioate internucleotide linkage modifications within position 1-5 of the sense strand (counting from the 5′-end of the sense strand), and two phosphorothioate internucleotide linkage modifications at positions 1 and 2 and two phosphorothioate internucleotide linkage modifications within positions 18-23 of the antisense strand (counting from the 5′-end of the antisense strand). The RNAi agent also comprises a 5′-P.

[0392] In one embodiment, B1 is 2′-OMe or 2′-F, n¹ is 8, T1 is 2′F, n² is 3, B2 is 2′-OMe, n³ is 7, n⁴ is 0, B3 is 2′-OMe, n⁵ is 3, B1′ is 2′-OMe or 2′-F, q¹ is 9, T1′ is 2′-F, q² is 1, B2′ is 2′-OMe or 2′-F, q³ is 4, T2′ is 2′-F, q⁴ is 2, B3′ is 2′-OMe or 2′-F, q⁵ is 5, T3′ is 2′-F, q⁶ is 1, B4′ is 2′-OMe, and q⁷ is 1; with two phosphorothioate internucleotide linkage modifications within position 1-5 of the sense strand (counting from the 5′-end of the sense strand), and two phosphorothioate internucleotide linkage modifications at positions 1 and 2 and two phosphorothioate internucleotide linkage modifications within positions 18-23 of the antisense strand (counting from the 5′-end of the antisense strand). The RNAi agent also comprises a 5′-PS.

[0393] In one embodiment, B1 is 2′-OMe or 2′-F, n¹ is 8, T1 is 2′F, n² is 3, B2 is 2′-OMe, n³ is 7, n⁴ is 0, B3 is 2′-OMe, n⁵ is 3, B1′ is 2′-OMe or 2′-F, q¹ is 9, T1′ is 2′-F, q² is 1, B2′ is 2′-OMe or 2′-F, q³ is 4, T2′ is 2′-F, q⁴ is 2, B3′ is 2′-OMe or 2′-F, q⁵ is 5, T3′ is 2′-F, q⁶ is 1, B4′ is 2′-OMe, and q⁷ is 1; with two phosphorothioate internucleotide linkage modifications within position 1-5 of the sense strand (counting from the 5′-end of the sense strand), and two phosphorothioate internucleotide linkage modifications at positions 1 and 2 and two phosphorothioate internucleotide linkage modifications within positions 18-23 of the antisense strand (counting from the 5′-end of the antisense strand). The RNAi agent also comprises a 5′-VP. The 5′-VP may be 5′-E-VP, 5′-Z-VP, or combination thereof.

[0394] In one embodiment, B1 is 2′-OMe or 2′-F, n¹ is 8, T1 is 2′F, n² is 3, B2 is 2′-OMe, n³ is 7, n⁴ is 0, B3 is 2′-OMe, n⁵ is 3, B1′ is 2′-OMe or 2′-F, q¹ is 9, T1′ is 2′-F, q² is 1, B2′ is 2′-OMe or 2′-F, q³ is 4, T2′ is 2′-F, q⁴ is 2, B3′ is 2′-OMe or 2′-F, q⁵ is 5, T3′ is 2′-F, q⁶ is 1, B4′ is 2′-OMe, and q⁷ is 1; with two phosphorothioate internucleotide linkage modifications within position 1-5 of the sense strand (counting from the 5′-end of the sense strand), and two phosphorothioate internucleotide linkage modifications at positions 1 and 2 and two phosphorothioate internucleotide linkage modifications within positions 18-23 of the antisense strand (counting from the 5′-end of the antisense strand). The RNAi agent also comprises a 5′-PS₂.

[0395] In one embodiment, B1 is 2′-OMe or 2′-F, n¹ is 8, T1 is 2′F, n² is 3, B2 is 2′-OMe, n³ is 7, n⁴ is 0, B3 is 2′-OMe, n⁵ is 3, B1′ is 2′-OMe or 2′-F, q¹ is 9, T1′ is 2′-F, q² is 1, B2′ is 2′-OMe or 2′-F, q³ is 4, T2′ is 2′-F, q⁴ is 2, B3′ is 2′-OMe or 2′-F, q⁵ is 5, T3′ is 2′-F, q⁶ is 1, B4′ is 2′-OMe, and q⁷ is 1; with two phosphorothioate internucleotide linkage modifications within position 1-5 of the sense strand (counting from the 5′-end of the sense strand), and two phosphorothioate internucleotide linkage modifications at positions 1 and 2 and two phosphorothioate internucleotide linkage modifications within positions 18-23 of the antisense strand (counting from the 5′-end of the antisense strand). The RNAi agent also comprises a 5′-deoxy-5′-C-malonyl.

[0396] In one embodiment, B1 is 2′-OMe or 2′-F, n¹ is 8, T1 is 2′F, n² is 3, B2 is 2′-OMe, n³ is 7, n⁴ is 0, B3 is 2′-OMe, n⁵ is 3, B1′ is 2′-OMe or 2′-F, q¹ is 9, T1′ is 2′-F, q² is 1, B2′ is 2′-OMe or 2′-F, q³ is 4, q⁴ is 0, B3′ is 2′-OMe or 2′-F, q⁵ is 7, T3′ is 2′-F, q⁶ is 1, B4′ is 2′-OMe, and q⁷ is 1. The RNAi agent also comprises a 5′-P.

[0397] In one embodiment, B1 is 2′-OMe or 2′-F, n¹ is 8, T1 is 2′F, n² is 3, B2 is 2′-OMe, n³ is 7, n⁴ is 0, B3 is 2′-OMe, n⁵ is 3, B1′ is 2′-OMe or 2′-F, q¹ is 9, T1′ is 2′-F, q² is 1, B2′ is 2′-OMe or 2′-F, q³ is 4, q⁴ is 0, B3′ is 2′-OMe or 2′-F, q⁵ is 7, T3′ is 2′-F, q⁶ is 1, B4′ is 2′-OMe, and q⁷ is 1. The dsRNA agent also comprises a 5′-PS.

[0398] In one embodiment, B1 is 2′-OMe or 2′-F, n¹ is 8, T1 is 2′F, n² is 3, B2 is 2′-OMe, n³ is 7, n⁴ is 0, B3 is 2′-OMe, n⁵ is 3, B1′ is 2′-OMe or 2′-F, q¹ is 9, T1′ is 2′-F, q² is 1, B2′ is 2′-OMe or 2′-F, q³ is 4, q⁴ is 0, B3′ is 2′-OMe or 2′-F, q⁵ is 7, T3′ is 2′-F, q⁶ is 1, B4′ is 2′-OMe, and q⁷ is 1. The RNAi agent also comprises a 5′-VP. The 5′-VP may be 5′-E-VP, 5′-Z-VP, or combination thereof.

[0399] In one embodiment, B1 is 2′-OMe or 2′-F, n¹ is 8, T1 is 2′F, n² is 3, B2 is 2′-OMe, n³ is 7, n⁴ is 0, B3 is 2′-OMe, n⁵ is 3, B1′ is 2′-OMe or 2′-F, q¹ is 9, T1′ is 2′-F, q² is 1, B2′ is 2′-OMe or 2′-F, q³ is 4, q⁴ is 0, B3′ is 2′-OMe or 2′-F, q⁵ is 7, T3′ is 2′-F, q⁶ is 1, B4′ is 2′-OMe, and q⁷ is 1. The RNAi agent also comprises a 5′-PS₂.

[0400] In one embodiment, B1 is 2′-OMe or 2′-F, n¹ is 8, T1 is 2′F, n² is 3, B2 is 2′-OMe, n³ is 7, n⁴ is 0, B3 is 2′-OMe, n⁵ is 3, B1′ is 2′-OMe or 2′-F, q¹ is 9, T1′ is 2′-F, q² is 1, B2′ is 2′-OMe or 2′-F, q³ is 4, q⁴ is 0, B3′ is 2′-OMe or 2′-F, q⁵ is 7, T3′ is 2′-F, q⁶ is 1, B4′ is 2′-OMe, and q⁷ is 1. The RNAi agent also comprises a 5′-deoxy-5′-C-malonyl.

[0401] In one embodiment, B1 is 2′-OMe or 2′-F, n¹ is 8, T1 is 2′F, n² is 3, B2 is 2′-OMe, n³ is 7, n⁴ is 0, B3 is 2′-OMe, n⁵ is 3, B1′ is 2′-OMe or 2′-F, q¹ is 9, T1′ is 2′-F, q² is 1, B2′ is 2′-OMe or 2′-F, q³ is 4, q⁴ is 0, B3′ is 2′-OMe or 2′-F, q⁵ is 7, T3′ is 2′-F, q⁶ is 1, B4′ is 2′-OMe, and q⁷ is 1; with two phosphorothioate internucleotide linkage modifications within position 1-5 of the sense strand (counting from the 5′-end), and two phosphorothioate internucleotide linkage modifications at positions 1 and 2 and two phosphorothioate internucleotide linkage modifications within positions 18-23 of the antisense strand (counting from the 5′-end). The RNAi agent also comprises a 5′-P.

[0402] In one embodiment, B1 is 2′-OMe or 2′-F, n¹ is 8, T1 is 2′F, n² is 3, B2 is 2′-OMe, n³ is 7, n⁴ is 0, B3 is 2′-OMe, n⁵ is 3, B1′ is 2′-OMe or 2′-F, q¹ is 9, T1′ is 2′-F, q² is 1, B2′ is 2′-OMe or 2′-F, q³ is 4, q⁴ is 0, B3′ is 2′-OMe or 2′-F, q⁵ is 7, T3′ is 2′-F, q⁶ is 1, B4′ is 2′-OMe, and q⁷ is 1; with two phosphorothioate internucleotide linkage modifications within position 1-5 of the sense strand (counting from the 5′-end), and two phosphorothioate internucleotide linkage modifications at positions 1 and 2 and two phosphorothioate internucleotide linkage modifications within positions 18-23 of the antisense strand (counting from the 5′-end). The RNAi agent also comprises a 5′-PS.

[0403] In one embodiment, B1 is 2′-OMe or 2′-F, n¹ is 8, T1 is 2′F, n² is 3, B2 is 2′-OMe, n³ is 7, n⁴ is 0, B3 is 2′-OMe, n⁵ is 3, B1′ is 2′-OMe or 2′-F, q¹ is 9, T1′ is 2′-F, q² is 1, B2′ is 2′-OMe or 2′-F, q³ is 4, q⁴ is 0, B3′ is 2′-OMe or 2′-F, q⁵ is 7, T3′ is 2′-F, q⁶ is 1, B4′ is 2′-OMe, and q⁷ is 1; with two phosphorothioate internucleotide linkage modifications within position 1-5 of the sense strand (counting from the 5′-end), and two phosphorothioate internucleotide linkage modifications at positions 1 and 2 and two phosphorothioate internucleotide linkage modifications within positions 18-23 of the antisense strand (counting from the 5′-end). The RNAi agent also comprises a 5′-VP. The 5′-VP may be 5′-E-VP, 5′-Z-VP, or combination thereof.

[0404] In one embodiment, B1 is 2′-OMe or 2′-F, n¹ is 8, T1 is 2′F, n² is 3, B2 is 2′-OMe, n³ is 7, n⁴ is 0, B3 is 2′-OMe, n⁵ is 3, B1′ is 2′-OMe or 2′-F, q¹ is 9, T1′ is 2′-F, q² is 1, B2′ is 2′-OMe or 2′-F, q³ is 4, q⁴ is 0, B3′ is 2′-OMe or 2′-F, q⁵ is 7, T3′ is 2′-F, q⁶ is 1, B4′ is 2′-OMe, and q⁷ is 1; with two phosphorothioate internucleotide linkage modifications within position 1-5 of the sense strand (counting from the 5′-end), and two phosphorothioate internucleotide linkage modifications at positions 1 and 2 and two phosphorothioate internucleotide linkage modifications within positions 18-23 of the antisense strand (counting from the 5′-end). The RNAi agent also comprises a 5′-PS₂.

[0405] In one embodiment, B1 is 2′-OMe or 2′-F, n¹ is 8, T1 is 2′F, n² is 3, B2 is 2′-OMe, n³ is 7, n⁴ is 0, B3 is 2′-OMe, n⁵ is 3, B1′ is 2′-OMe or 2′-F, q¹ is 9, T1′ is 2′-F, q² is 1, B2′ is 2′-OMe or 2′-F, q³ is 4, q⁴ is 0, B3′ is 2′-OMe or 2′-F, q⁵ is 7, T3′ is 2′-F, q⁶ is 1, B4′ is 2′-OMe, and q⁷ is 1; with two phosphorothioate internucleotide linkage modifications within position 1-5 of the sense strand (counting from the 5′-end), and two phosphorothioate internucleotide linkage modifications at positions 1 and 2 and two phosphorothioate internucleotide linkage modifications within positions 18-23 of the antisense strand (counting from the 5′-end). The RNAi agent also comprises a 5′-deoxy-5′-C-malonyl.

[0406] In one embodiment, B1 is 2′-OMe or 2′-F, n¹ is 8, T1 is 2′F, n² is 3, B2 is 2′-OMe, n³ is 7, n⁴ is 0, B3 is 2′OMe, n⁵ is 3, B1′ is 2′-OMe or 2′-F, q¹ is 9, T1′ is 2′-F, q² is 1, B2′ is 2′-OMe or 2′-F, q³ is 4, T2′ is 2′-F, q⁴ is 2, B3′ is 2′-OMe or 2′-F, q⁵ is 5, T3′ is 2′-F, q⁶ is 1, B4′ is 2′-F, and q⁷ is 1. The RNAi agent also comprises a 5′-P.

[0407] In one embodiment, B1 is 2′-OMe or 2′-F, n¹ is 8, T1 is 2′F, n² is 3, B2 is 2′-OMe, n³ is 7, n⁴ is 0, B3 is 2′OMe, n⁵ is 3, B1′ is 2′-OMe or 2′-F, q¹ is 9, T1′ is 2′-F, q² is 1, B2′ is 2′-OMe or 2′-F, q³ is 4, T2′ is 2′-F, q⁴ is 2, B3′ is 2′-OMe or 2′-F, q⁵ is 5, T3′ is 2′-F, q⁶ is 1, B4′ is 2′-F, and q⁷ is 1. The RNAi agent also comprises a 5′-PS.

[0408] In one embodiment, B1 is 2′-OMe or 2′-F, n¹ is 8, T1 is 2′F, n² is 3, B2 is 2′-OMe, n³ is 7, n⁴ is 0, B3 is 2′OMe, n⁵ is 3, B1′ is 2′-OMe or 2′-F, q¹ is 9, T1′ is 2′-F, q² is 1, B2′ is 2′-OMe or 2′-F, q³ is 4, T2′ is 2′-F, q⁴ is 2, B3′ is 2′-OMe or 2′-F, q⁵ is 5, T3′ is 2′-F, q⁶ is 1, B4′ is 2′-F, and q⁷ is 1. The RNAi agent also comprises a 5′-VP. The 5′-VP may be 5′-E-VP, 5′-Z-VP, or combination thereof.

[0409] In one embodiment, B1 is 2′-OMe or 2′-F, n¹ is 8, T1 is 2′F, n² is 3, B2 is 2′-OMe, n³ is 7, n⁴ is 0, B3 is 2′OMe, n⁵ is 3, B1′ is 2′-OMe or 2′-F, q¹ is 9, T1′ is 2′-F, q² is 1, B2′ is 2′-OMe or 2′-F, q³ is 4, T2′ is 2′-F, q⁴ is 2, B3′ is 2′-OMe or 2′-F, q⁵ is 5, T3′ is 2′-F, q⁶ is 1, B4′ is 2′-F, and q⁷ is 1. The dsRNAi RNA agent also comprises a 5′-PS₂.

[0410] In one embodiment, B1 is 2′-OMe or 2′-F, n¹ is 8, T1 is 2′F, n² is 3, B2 is 2′-OMe, n³ is 7, n⁴ is 0, B3 is 2′OMe, n⁵ is 3, B1′ is 2′-OMe or 2′-F, q¹ is 9, T1′ is 2′-F, q² is 1, B2′ is 2′-OMe or 2′-F, q³ is 4, T2′ is 2′-F, q⁴ is 2, B3′ is 2′-OMe or 2′-F, q⁵ is 5, T3′ is 2′-F, q⁶ is 1, B4′ is 2′-F, and q⁷ is 1. The RNAi agent also comprises a 5′-deoxy-5′-C-malonyl.

[0411] In one embodiment, B1 is 2′-OMe or 2′-F, n¹ is 8, T1 is 2′F, n² is 3, B2 is 2′-OMe, n³ is 7, n⁴ is 0, B3 is 2′-OMe, n⁵ is 3, B1′ is 2′-OMe or 2′-F, q¹ is 9, T1′ is 2′-F, q² is 1, B2′ is 2′-OMe or 2′-F, q³ is 4, T2′ is 2′-F, q⁴ is 2, B3′ is 2′-OMe or 2′-F, q⁵ is 5, T3′ is 2′-F, q⁶ is 1, B4′ is 2′-F, and q⁷ is 1; with two phosphorothioate internucleotide linkage modifications within position 1-5 of the sense strand (counting from the 5′-end of the sense strand), and two phosphorothioate internucleotide linkage modifications at positions 1 and 2 and two phosphorothioate internucleotide linkage modifications within positions 18-23 of the antisense strand (counting from the 5′-end of the antisense strand). The RNAi agent also comprises a 5′-P.

[0412] In one embodiment, B1 is 2′-OMe or 2′-F, n¹ is 8, T1 is 2′F, n² is 3, B2 is 2′-OMe, n³ is 7, n⁴ is 0, B3 is 2′-OMe, n⁵ is 3, B1′ is 2′-OMe or 2′-F, q¹ is 9, T1′ is 2′-F, q² is 1, B2′ is 2′-OMe or 2′-F, q³ is 4, T2′ is 2′-F, q⁴ is 2, B3′ is 2′-OMe or 2′-F, q⁵ is 5, T3′ is 2′-F, q⁶ is 1, B4′ is 2′-F, and q⁷ is 1; with two phosphorothioate internucleotide linkage modifications within position 1-5 of the sense strand (counting from the 5′-end of the sense strand), and two phosphorothioate internucleotide linkage modifications at positions 1 and 2 and two phosphorothioate internucleotide linkage modifications within positions 18-23 of the antisense strand (counting from the 5′-end of the antisense strand). The RNAi agent also comprises a 5′-PS.

[0413] In one embodiment, B1 is 2′-OMe or 2′-F, n¹ is 8, T1 is 2′F, n² is 3, B2 is 2′-OMe, n³ is 7, n⁴ is 0, B3 is 2′-OMe, n⁵ is 3, B1′ is 2′-OMe or 2′-F, q¹ is 9, T1′ is 2′-F, q² is 1, B2′ is 2′-OMe or 2′-F, q³ is 4, T2′ is 2′-F, q⁴ is 2, B3′ is 2′-OMe or 2′-F, q⁵ is 5, T3′ is 2′-F, q⁶ is 1, B4′ is 2′-F, and q⁷ is 1; with two phosphorothioate internucleotide linkage modifications within position 1-5 of the sense strand (counting from the 5′-end of the sense strand), and two phosphorothioate internucleotide linkage modifications at positions 1 and 2 and two phosphorothioate internucleotide linkage modifications within positions 18-23 of the antisense strand (counting from the 5′-end of the antisense strand). The RNAi agent also comprises a 5′-VP. The 5′-VP may be 5′-E-VP, 5′-Z-VP, or combination thereof.

[0414] In one embodiment, B1 is 2′-OMe or 2′-F, n¹ is 8, T1 is 2′F, n² is 3, B2 is 2′-OMe, n³ is 7, n⁴ is 0, B3 is 2′-OMe, n⁵ is 3, B1′ is 2′-OMe or 2′-F, q¹ is 9, T1′ is 2′-F, q² is 1, B2′ is 2′-OMe or 2′-F, q³ is 4, T2′ is 2′-F, q⁴ is 2, B3′ is 2′-OMe or 2′-F, q⁵ is 5, T3′ is 2′-F, q⁶ is 1, B4′ is 2′-F, and q⁷ is 1; with two phosphorothioate internucleotide linkage modifications within position 1-5 of the sense strand (counting from the 5′-end of the sense strand), and two phosphorothioate internucleotide linkage modifications at positions 1 and 2 and two phosphorothioate internucleotide linkage modifications within positions 18-23 of the antisense strand (counting from the 5′-end of the antisense strand). The RNAi agent also comprises a 5′-PS₂.

[0415] In one embodiment, B1 is 2′-OMe or 2′-F, n¹ is 8, T1 is 2′F, n² is 3, B2 is 2′-OMe, n³ is 7, n⁴ is 0, B3 is 2′-OMe, n⁵ is 3, B1′ is 2′-OMe or 2′-F, q¹ is 9, T1′ is 2′-F, q² is 1, B2′ is 2′-OMe or 2′-F, q³ is 4, T2′ is 2′-F, q⁴ is 2, B3′ is 2′-OMe or 2′-F, q⁵ is 5, T3′ is 2′-F, q⁶ is 1, B4′ is 2′-F, and q⁷ is 1; with two phosphorothioate internucleotide linkage modifications within position 1-5 of the sense strand (counting from the 5′-end of the sense strand), and two phosphorothioate internucleotide linkage modifications at positions 1 and 2 and two phosphorothioate internucleotide linkage modifications within positions 18-23 of the antisense strand (counting from the 5′-end of the antisense strand). The RNAi agent also comprises a 5′-deoxy-5′-C-malonyl.

[0416] In one embodiment, B1 is 2′-OMe or 2′-F, n¹ is 8, T1 is 2′F, n² is 3, B2 is 2′-OMe, n³ is 7, n⁴ is 0, B3 is 2′-OMe, n⁵ is 3, B1′ is 2′-OMe or 2′-F, q¹ is 9, T1′ is 2′-F, q² is 1, B2′ is 2′-OMe or 2′-F, q³ is 4, q⁴ is 0, B3′ is 2′-OMe or 2′-F, q⁵ is 7, T3′ is 2′-F, q⁶ is 1, B4′ is 2′-F, and q⁷ is 1. The RNAi agent also comprises a 5′-P.

[0417] In one embodiment, B1 is 2′-OMe or 2′-F, n¹ is 8, T1 is 2′F, n² is 3, B2 is 2′-OMe, n³ is 7, n⁴ is 0, B3 is 2′-OMe, n⁵ is 3, B1′ is 2′-OMe or 2′-F, q¹ is 9, T1′ is 2′-F, q² is 1, B2′ is 2′-OMe or 2′-F, q³ is 4, q⁴ is 0, B3′ is 2′-OMe or 2′-F, q⁵ is 7, T3′ is 2′-F, q⁶ is 1, B4′ is 2′-F, and q⁷ is 1. The RNAi agent also comprises a 5′-PS.

[0418] In one embodiment, B1 is 2′-OMe or 2′-F, n¹ is 8, T1 is 2′F, n² is 3, B2 is 2′-OMe, n³ is 7, n⁴ is 0, B3 is 2′-OMe, n⁵ is 3, B1′ is 2′-OMe or 2′-F, q¹ is 9, T1′ is 2′-F, q² is 1, B2′ is 2′-OMe or 2′-F, q³ is 4, q⁴ is 0, B3′ is 2′-OMe or 2′-F, q⁵ is 7, T3′ is 2′-F, q⁶ is 1, B4′ is 2′-F, and q⁷ is 1. The RNAi agent also comprises a 5′-VP. The 5′-VP may be 5′-E-VP, 5′-Z-VP, or combination thereof.

[0419] In one embodiment, B1 is 2′-OMe or 2′-F, n¹ is 8, T1 is 2′F, n² is 3, B2 is 2′-OMe, n³ is 7, n⁴ is 0, B3 is 2′-OMe, n⁵ is 3, B1′ is 2′-OMe or 2′-F, q¹ is 9, T1′ is 2′-F, q² is 1, B2′ is 2′-OMe or 2′-F, q³ is 4, q⁴ is 0, B3′ is 2′-OMe or 2′-F, q⁵ is 7, T3′ is 2′-F, q⁶ is 1, B4′ is 2′-F, and q⁷ is 1. The RNAi agent also comprises a 5′-PS₂.

[0420] In one embodiment, B1 is 2′-OMe or 2′-F, n¹ is 8, T1 is 2′F, n² is 3, B2 is 2′-OMe, n³ is 7, n⁴ is 0, B3 is 2′-OMe, n⁵ is 3, B1′ is 2′-OMe or 2′-F, q¹ is 9, T1′ is 2′-F, q² is 1, B2′ is 2′-OMe or 2′-F, q³ is 4, q⁴ is 0, B3′ is 2′-OMe or 2′-F, q⁵ is 7, T3′ is 2′-F, q⁶ is 1, B4′ is 2′-F, and q⁷ is 1. The RNAi agent also comprises a 5′-deoxy-5′-C-malonyl.

[0421] In one embodiment, B1 is 2′-OMe or 2′-F, n¹ is 8, T1 is 2′F, n² is 3, B2 is 2′-OMe, n³ is 7, n⁴ is 0, B3 is 2′-OMe, n⁵ is 3, B1′ is 2′-OMe or 2′-F, q¹ is 9, T1′ is 2′-F, q² is 1, B2′ is 2′-OMe or 2′-F, q³ is 4, q⁴ is 0, B3′ is 2′-OMe or 2′-F, q⁵ is 7, T3′ is 2′-F, q⁶ is 1, B4′ is 2′-F, and q⁷ is 1; with two phosphorothioate internucleotide linkage modifications within position 1-5 of the sense strand (counting from the 5′-end of the sense strand), and two phosphorothioate internucleotide linkage modifications at positions 1 and 2 and two phosphorothioate internucleotide linkage modifications within positions 18-23 of the antisense strand (counting from the 5′-end of the antisense strand). The RNAi agent also comprises a 5′-P.

[0422] In one embodiment, B1 is 2′-OMe or 2′-F, n¹ is 8, T1 is 2′F, n² is 3, B2 is 2′-OMe, n³ is 7, n⁴ is 0, B3 is 2′-OMe, n⁵ is 3, B1′ is 2′-OMe or 2′-F, q¹ is 9, T1′ is 2′-F, q² is 1, B2′ is 2′-OMe or 2′-F, q³ is 4, q⁴ is 0, B3′ is 2′-OMe or 2′-F, q⁵ is 7, T3′ is 2′-F, q⁶ is 1, B4′ is 2′-F, and q⁷ is 1; with two phosphorothioate internucleotide linkage modifications within position 1-5 of the sense strand (counting from the 5′-end of the sense strand), and two phosphorothioate internucleotide linkage modifications at positions 1 and 2 and two phosphorothioate internucleotide linkage modifications within positions 18-23 of the antisense strand (counting from the 5′-end of the antisense strand). The RNAi agent also comprises a 5′-PS.

[0423] In one embodiment, B1 is 2′-OMe or 2′-F, n¹ is 8, T1 is 2′F, n² is 3, B2 is 2′-OMe, n³ is 7, n⁴ is 0, B3 is 2′-OMe, n⁵ is 3, B1′ is 2′-OMe or 2′-F, q¹ is 9, T1′ is 2′-F, q² is 1, B2′ is 2′-OMe or 2′-F, q³ is 4, q⁴ is 0, B3′ is 2′-OMe or 2′-F, q⁵ is 7, T3′ is 2′-F, q⁶ is 1, B4′ is 2′-F, and q⁷ is 1; with two phosphorothioate internucleotide linkage modifications within position 1-5 of the sense strand (counting from the 5′-end of the sense strand), and two phosphorothioate internucleotide linkage modifications at positions 1 and 2 and two phosphorothioate internucleotide linkage modifications within positions 18-23 of the antisense strand (counting from the 5′-end of the antisense strand). The RNAi agent also comprises a 5′-VP. The 5′-VP may be 5′-E-VP, 5′-Z-VP, or combination thereof.

[0424] In one embodiment, B1 is 2′-OMe or 2′-F, n¹ is 8, T1 is 2′F, n² is 3, B2 is 2′-OMe, n³ is 7, n⁴ is 0, B3 is 2′-OMe, n⁵ is 3, B1′ is 2′-OMe or 2′-F, q¹ is 9, T1′ is 2′-F, q² is 1, B2′ is 2′-OMe or 2′-F, q³ is 4, q⁴ is 0, B3′ is 2′-OMe or 2′-F, q⁵ is 7, T3′ is 2′-F, q⁶ is 1, B4′ is 2′-F, and q⁷ is 1; with two phosphorothioate internucleotide linkage modifications within position 1-5 of the sense strand (counting from the 5′-end of the sense strand), and two phosphorothioate internucleotide linkage modifications at positions 1 and 2 and two phosphorothioate internucleotide linkage modifications within positions 18-23 of the antisense strand (counting from the 5′-end of the antisense strand). The RNAi agent also comprises a 5′-PS₂.

[0425] In one embodiment, B1 is 2′-OMe or 2′-F, n¹ is 8, T1 is 2′F, n² is 3, B2 is 2′-OMe, n³ is 7, n⁴ is 0, B3 is 2′-OMe, n⁵ is 3, B1′ is 2′-OMe or 2′-F, q¹ is 9, T1′ is 2′-F, q² is 1, B2′ is 2′-OMe or 2′-F, q³ is 4, q⁴ is 0, B3′ is 2′-OMe or 2′-F, q⁵ is 7, T3′ is 2′-F, q⁶ is 1, B4′ is 2′-F, and q⁷ is 1; with two phosphorothioate internucleotide linkage modifications within position 1-5 of the sense strand (counting from the 5′-end of the sense strand), and two phosphorothioate internucleotide linkage modifications at positions 1 and 2 and two phosphorothioate internucleotide linkage modifications within positions 18-23 of the antisense strand (counting from the 5′-end of the antisense strand). The RNAi agent also comprises a 5′-deoxy-5′-C-malonyl.

[0426] In one embodiment, B1 is 2′-OMe or 2′-F, n¹ is 8, T1 is 2′F, n² is 3, B2 is 2′-OMe, n³ is 7, n⁴ is 0, B3 is 2′-OMe, n⁵ is 3, B1′ is 2′-OMe or 2′-F, q¹ is 9, T1′ is 2′-F, q² is 1, B2′ is 2′-OMe or 2′-F, q³ is 4, T2′ is 2′-F, q⁴ is 2, B3′ is 2′-OMe or 2′-F, q⁵ is 5, T3′ is 2′-F, q⁶ is 1, B4′ is 2′-OMe, and q⁷ is 1; with two phosphorothioate internucleotide linkage modifications within position 1-5 of the sense strand (counting from the 5′-end of the sense strand), and two phosphorothioate internucleotide linkage modifications at positions 1 and 2 and two phosphorothioate internucleotide linkage modifications within positions 18-23 of the antisense strand (counting from the 5′-end of the antisense strand). The RNAi agent also comprises a 5′-P and a targeting ligand. In one embodiment, the 5′-P is at the 5′-end of the antisense strand, and the targeting ligand is at the 3′-end of the sense strand.

[0427] In one embodiment, B1 is 2′-OMe or 2′-F, n¹ is 8, T1 is 2′F, n² is 3, B2 is 2′-OMe, n³ is 7, n⁴ is 0, B3 is 2′-OMe, n⁵ is 3, B1′ is 2′-OMe or 2′-F, q¹ is 9, T1′ is 2′-F, q² is 1, B2′ is 2′-OMe or 2′-F, q³ is 4, T2′ is 2′-F, q⁴ is 2, B3′ is 2′-OMe or 2′-F, q⁵ is 5, T3′ is 2′-F, q⁶ is 1, B4′ is 2′-OMe, and q⁷ is 1; with two phosphorothioate internucleotide linkage modifications within position 1-5 of the sense strand (counting from the 5′-end of the sense strand), and two phosphorothioate internucleotide linkage modifications at positions 1 and 2 and two phosphorothioate internucleotide linkage modifications within positions 18-23 of the antisense strand (counting from the 5′-end of the antisense strand). The RNAi agent also comprises a 5′-PS and a targeting ligand. In one embodiment, the 5′-PS is at the 5′-end of the antisense strand, and the targeting ligand is at the 3′-end of the sense strand.

[0428] In one embodiment, B1 is 2′-OMe or 2′-F, n¹ is 8, T1 is 2′F, n² is 3, B2 is 2′-OMe, n³ is 7, n⁴ is 0, B3 is 2′-OMe, n⁵ is 3, B1′ is 2′-OMe or 2′-F, q¹ is 9, T1′ is 2′-F, q² is 1, B2′ is 2′-OMe or 2′-F, q³ is 4, T2′ is 2′-F, q⁴ is 2, B3′ is 2′-OMe or 2′-F, q⁵ is 5, T3′ is 2′-F, q⁶ is 1, B4′ is 2′-OMe, and q⁷ is 1; with two phosphorothioate internucleotide linkage modifications within position 1-5 of the sense strand (counting from the 5′-end of the sense strand), and two phosphorothioate internucleotide linkage modifications at positions 1 and 2 and two phosphorothioate internucleotide linkage modifications within positions 18-23 of the antisense strand (counting from the 5′-end of the antisense strand). The RNAi agent also comprises a 5′-VP (e.g., a 5′-E-VP, 5′-Z-VP, or combination thereof), and a targeting ligand.

[0429] In one embodiment, the 5′-VP is at the 5′-end of the antisense strand, and the targeting ligand is at the 3′-end of the sense strand.

[0430] In one embodiment, B1 is 2′-OMe or 2′-F, n¹ is 8, T1 is 2′F, n² is 3, B2 is 2′-OMe, n³ is 7, n⁴ is 0, B3 is 2′-OMe, n⁵ is 3, B1′ is 2′-OMe or 2′-F, q¹ is 9, T1′ is 2′-F, q² is 1, B2′ is 2′-OMe or 2′-F, q³ is 4, T2′ is 2′-F, q⁴ is 2, B3′ is 2′-OMe or 2′-F, q⁵ is 5, T3′ is 2′-F, q⁶ is 1, B4′ is 2′-OMe, and q⁷ is 1; with two phosphorothioate internucleotide linkage modifications within position 1-5 of the sense strand (counting from the 5′-end of the sense strand), and two phosphorothioate internucleotide linkage modifications at positions 1 and 2 and two phosphorothioate internucleotide linkage modifications within positions 18-23 of the antisense strand (counting from the 5′-end of the antisense strand). The RNAi agent also comprises a 5′-PS₂ and a targeting ligand. In one embodiment, the 5′-PS₂ is at the 5′-end of the antisense strand, and the targeting ligand is at the 3′-end of the sense strand.

[0431] In one embodiment, B1 is 2′-OMe or 2′-F, n¹ is 8, T1 is 2′F, n² is 3, B2 is 2′-OMe, n³ is 7, n⁴ is 0, B3 is 2′-OMe, n⁵ is 3, B1′ is 2′-OMe or 2′-F, q¹ is 9, T1′ is 2′-F, q² is 1, B2′ is 2′-OMe or 2′-F, q³ is 4, T2′ is 2′-F, q⁴ is 2, B3′ is 2′-OMe or 2′-F, q⁵ is 5, T3′ is 2′-F, q⁶ is 1, B4′ is 2′-OMe, and q⁷ is 1; with two phosphorothioate internucleotide linkage modifications within position 1-5 of the sense strand (counting from the 5′-end of the sense strand), and two phosphorothioate internucleotide linkage modifications at positions 1 and 2 and two phosphorothioate internucleotide linkage modifications within positions 18-23 of the antisense strand (counting from the 5′-end of the antisense strand). The RNAi agent also comprises a 5′-deoxy-5′-C-malonyl and a targeting ligand. In one embodiment, the 5′-deoxy-5′-C-malonyl is at the 5′-end of the antisense strand, and the targeting ligand is at the 3′-end of the sense strand.

[0432] In one embodiment, B1 is 2′-OMe or 2′-F, n¹ is 8, T1 is 2′F, n² is 3, B2 is 2′-OMe, n³ is 7, n⁴ is 0, B3 is 2′-OMe, n⁵ is 3, B1′ is 2′-OMe or 2′-F, q¹ is 9, T1′ is 2′-F, q² is 1, B2′ is 2′-OMe or 2′-F, q³ is 4, q⁴ is 0, B3′ is 2′-OMe or 2′-F, q⁵ is 7, T3′ is 2′-F, q⁶ is 1, B4′ is 2′-OMe, and q⁷ is 1; with two phosphorothioate internucleotide linkage modifications within position 1-5 of the sense strand (counting from the 5′-end), and two phosphorothioate internucleotide linkage modifications at positions 1 and 2 and two phosphorothioate internucleotide linkage modifications within positions 18-23 of the antisense strand (counting from the 5′-end). The RNAi agent also comprises a 5′-P and a targeting ligand. In one embodiment, the 5′-P is at the 5′-end of the antisense strand, and the targeting ligand is at the 3′-end of the sense strand.

[0433] In one embodiment, B1 is 2′-OMe or 2′-F, n¹ is 8, T1 is 2′F, n² is 3, B2 is 2′-OMe, n³ is 7, n⁴ is 0, B3 is 2′-OMe, n⁵ is 3, B1′ is 2′-OMe or 2′-F, q¹ is 9, T1′ is 2′-F, q² is 1, B2′ is 2′-OMe or 2′-F, q³ is 4, q⁴ is 0, B3′ is 2′-OMe or 2′-F, q⁵ is 7, T3′ is 2′-F, q⁶ is 1, B4′ is 2′-OMe, and q⁷ is 1; with two phosphorothioate internucleotide linkage modifications within position 1-5 of the sense strand (counting from the 5′-end), and two phosphorothioate internucleotide linkage modifications at positions 1 and 2 and two phosphorothioate internucleotide linkage modifications within positions 18-23 of the antisense strand (counting from the 5′-end). The RNAi agent also comprises a 5′-PS and a targeting ligand. In one embodiment, the 5′-PS is at the 5′-end of the antisense strand, and the targeting ligand is at the 3′-end of the sense strand.

[0434] In one embodiment, B1 is 2′-OMe or 2′-F, n¹ is 8, T1 is 2′F, n² is 3, B2 is 2′-OMe, n³ is 7, n⁴ is 0, B3 is 2′-OMe, n⁵ is 3, B1′ is 2′-OMe or 2′-F, q¹ is 9, T1′ is 2′-F, q² is 1, B2′ is 2′-OMe or 2′-F, q³ is 4, q⁴ is 0, B3′ is 2′-OMe or 2′-F, q⁵ is 7, T3′ is 2′-F, q⁶ is 1, B4′ is 2′-OMe, and q⁷ is 1; with two phosphorothioate internucleotide linkage modifications within position 1-5 of the sense strand (counting from the 5′-end), and two phosphorothioate internucleotide linkage modifications at positions 1 and 2 and two phosphorothioate internucleotide linkage modifications within positions 18-23 of the antisense strand (counting from the 5′-end). The RNAi agent also comprises a 5′-VP (e.g., a 5′-E-VP, 5′-Z-VP, or combination thereof) and a targeting ligand. In one embodiment, the 5′-VP is at the 5′-end of the antisense strand, and the targeting ligand is at the 3′-end of the sense strand.

[0435] In one embodiment, B1 is 2′-OMe or 2′-F, n¹ is 8, T1 is 2′F, n² is 3, B2 is 2′-OMe, n³ is 7, n⁴ is 0, B3 is 2′-OMe, n⁵ is 3, B1′ is 2′-OMe or 2′-F, q¹ is 9, T1′ is 2′-F, q² is 1, B2′ is 2′-OMe or 2′-F, q³ is 4, q⁴ is 0, B3′ is 2′-OMe or 2′-F, q⁵ is 7, T3′ is 2′-F, q⁶ is 1, B4′ is 2′-OMe, and q⁷ is 1; with two phosphorothioate internucleotide linkage modifications within position 1-5 of the sense strand (counting from the 5′-end), and two phosphorothioate internucleotide linkage modifications at positions 1 and 2 and two phosphorothioate internucleotide linkage modifications within positions 18-23 of the antisense strand (counting from the 5′-end). The RNAi agent also comprises a 5′-PS₂ and a targeting ligand. In one embodiment, the 5′-PS₂ is at the 5′-end of the antisense strand, and the targeting ligand is at the 3′-end of the sense strand.

[0436] In one embodiment, B1 is 2′-OMe or 2′-F, n¹ is 8, T1 is 2′F, n² is 3, B2 is 2′-OMe, n³ is 7, n⁴ is 0, B3 is 2′-OMe, n⁵ is 3, B1′ is 2′-OMe or 2′-F, q¹ is 9, T1′ is 2′-F, q² is 1, B2′ is 2′-OMe or 2′-F, q³ is 4, q⁴ is 0, B3′ is 2′-OMe or 2′-F, q⁵ is 7, T3′ is 2′-F, q⁶ is 1, B4′ is 2′-OMe, and q⁷ is 1; with two phosphorothioate internucleotide linkage modifications within position 1-5 of the sense strand (counting from the 5′-end), and two phosphorothioate internucleotide linkage modifications at positions 1 and 2 and two phosphorothioate internucleotide linkage modifications within positions 18-23 of the antisense strand (counting from the 5′-end). The RNAi agent also comprises a 5′-deoxy-5′-C-malonyl and a targeting ligand. In one embodiment, the 5′-deoxy-5′-C-malonyl is at the 5′-end of the antisense strand, and the targeting ligand is at the 3′-end of the sense strand.

[0437] In one embodiment, B1 is 2′-OMe or 2′-F, n¹ is 8, T1 is 2′F, n² is 3, B2 is 2′-OMe, n³ is 7, n⁴ is 0, B3 is 2′-OMe, n⁵ is 3, B1′ is 2′-OMe or 2′-F, q¹ is 9, T1′ is 2′-F, q² is 1, B2′ is 2′-OMe or 2′-F, q³ is 4, T2′ is 2′-F, q⁴ is 2, B3′ is 2′-OMe or 2′-F, q⁵ is 5, T3′ is 2′-F, q⁶ is 1, B4′ is 2′-F, and q⁷ is 1; with two phosphorothioate internucleotide linkage modifications within position 1-5 of the sense strand (counting from the 5′-end of the sense strand), and two phosphorothioate internucleotide linkage modifications at positions 1 and 2 and two phosphorothioate internucleotide linkage modifications within positions 18-23 of the antisense strand (counting from the 5′-end of the antisense strand). The RNAi agent also comprises a 5′-P and a targeting ligand. In one embodiment, the 5′-P is at the 5′-end of the antisense strand, and the targeting ligand is at the 3′-end of the sense strand.

[0438] In one embodiment, B1 is 2′-OMe or 2′-F, n¹ is 8, T1 is 2′F, n² is 3, B2 is 2′-OMe, n³ is 7, n⁴ is 0, B3 is 2′-OMe, n⁵ is 3, B1′ is 2′-OMe or 2′-F, q¹ is 9, T1′ is 2′-F, q² is 1, B2′ is 2′-OMe or 2′-F, q³ is 4, T2′ is 2′-F, q⁴ is 2, B3′ is 2′-OMe or 2′-F, q⁵ is 5, T3′ is 2′-F, q⁶ is 1, B4′ is 2′-F, and q⁷ is 1; with two phosphorothioate internucleotide linkage modifications within position 1-5 of the sense strand (counting from the 5′-end of the sense strand), and two phosphorothioate internucleotide linkage modifications at positions 1 and 2 and two phosphorothioate internucleotide linkage modifications within positions 18-23 of the antisense strand (counting from the 5′-end of the antisense strand). The RNAi agent also comprises a 5′-PS and a targeting ligand. In one embodiment, the 5′-PS is at the 5′-end of the antisense strand, and the targeting ligand is at the 3′-end of the sense strand.

[0439] In one embodiment, B1 is 2′-OMe or 2′-F, n¹ is 8, T1 is 2′F, n² is 3, B2 is 2′-OMe, n³ is 7, n⁴ is 0, B3 is 2′-OMe, n⁵ is 3, B1′ is 2′-OMe or 2′-F, q¹ is 9, T1′ is 2′-F, q² is 1, B2′ is 2′-OMe or 2′-F, q³ is 4, T2′ is 2′-F, q⁴ is 2, B3′ is 2′-OMe or 2′-F, q⁵ is 5, T3′ is 2′-F, q⁶ is 1, B4′ is 2′-F, and q⁷ is 1; with two phosphorothioate internucleotide linkage modifications within position 1-5 of the sense strand (counting from the 5′-end of the sense strand), and two phosphorothioate internucleotide linkage modifications at positions 1 and 2 and two phosphorothioate internucleotide linkage modifications within positions 18-23 of the antisense strand (counting from the 5′-end of the antisense strand). The RNAi agent also comprises a 5′-VP (e.g., a 5′-E-VP, 5′-Z-VP, or combination thereof) and a targeting ligand. In one embodiment, the 5′-VP is at the 5′-end of the antisense strand, and the targeting ligand is at the 3′-end of the sense strand.

[0440] In one embodiment, B1 is 2′-OMe or 2′-F, n¹ is 8, T1 is 2′F, n² is 3, B2 is 2′-OMe, n³ is 7, n⁴ is 0, B3 is 2′-OMe, n⁵ is 3, B1′ is 2′-OMe or 2′-F, q¹ is 9, T1′ is 2′-F, q² is 1, B2′ is 2′-OMe or 2′-F, q³ is 4, T2′ is 2′-F, q⁴ is 2, B3′ is 2′-OMe or 2′-F, q⁵ is 5, T3′ is 2′-F, q⁶ is 1, B4′ is 2′-F, and q⁷ is 1; with two phosphorothioate internucleotide linkage modifications within position 1-5 of the sense strand (counting from the 5′-end of the sense strand), and two phosphorothioate internucleotide linkage modifications at positions 1 and 2 and two phosphorothioate internucleotide linkage modifications within positions 18-23 of the antisense strand (counting from the 5′-end of the antisense strand). The RNAi agent also comprises a 5′-PS₂ and a targeting ligand. In one embodiment, the 5′-PS₂ is at the 5′-end of the antisense strand, and the targeting ligand is at the 3′-end of the sense strand.

[0441] In one embodiment, B1 is 2′-OMe or 2′-F, n¹ is 8, T1 is 2′F, n² is 3, B2 is 2′-OMe, n³ is 7, n⁴ is 0, B3 is 2′-OMe, n⁵ is 3, B1′ is 2′-OMe or 2′-F, q¹ is 9, T1′ is 2′-F, q² is 1, B2′ is 2′-OMe or 2′-F, q³ is 4, T2′ is 2′-F, q⁴ is 2, B3′ is 2′-OMe or 2′-F, q⁵ is 5, T3′ is 2′-F, q⁶ is 1, B4′ is 2′-F, and q⁷ is 1; with two phosphorothioate internucleotide linkage modifications within position 1-5 of the sense strand (counting from the 5′-end of the sense strand), and two phosphorothioate internucleotide linkage modifications at positions 1 and 2 and two phosphorothioate internucleotide linkage modifications within positions 18-23 of the antisense strand (counting from the 5′-end of the antisense strand). The RNAi agent also comprises a 5′-deoxy-5′-C-malonyl and a targeting ligand. In one embodiment, the 5′-deoxy-5′-C-malonyl is at the 5′-end of the antisense strand, and the targeting ligand is at the 3′-end of the sense strand.

[0442] In one embodiment, B1 is 2′-OMe or 2′-F, n¹ is 8, T1 is 2′F, n² is 3, B2 is 2′-OMe, n³ is 7, n⁴ is 0, B3 is 2′-OMe, n⁵ is 3, B1′ is 2′-OMe or 2′-F, q¹ is 9, T1′ is 2′-F, q² is 1, B2′ is 2′-OMe or 2′-F, q³ is 4, q⁴ is 0, B3′ is 2′-OMe or 2′-F, q⁵ is 7, T3′ is 2′-F, q⁶ is 1, B4′ is 2′-F, and q⁷ is 1; with two phosphorothioate internucleotide linkage modifications within position 1-5 of the sense strand (counting from the 5′-end of the sense strand), and two phosphorothioate internucleotide linkage modifications at positions 1 and 2 and two phosphorothioate internucleotide linkage modifications within positions 18-23 of the antisense strand (counting from the 5′-end of the antisense strand). The RNAi agent also comprises a 5′-P and a targeting ligand. In one embodiment, the 5′-P is at the 5′-end of the antisense strand, and the targeting ligand is at the 3′-end of the sense strand.

[0443] In one embodiment, B1 is 2′-OMe or 2′-F, n¹ is 8, T1 is 2′F, n² is 3, B2 is 2′-OMe, n³ is 7, n⁴ is 0, B3 is 2′-OMe, n⁵ is 3, B1′ is 2′-OMe or 2′-F, q¹ is 9, T1′ is 2′-F, q² is 1, B2′ is 2′-OMe or 2′-F, q³ is 4, q⁴ is 0, B3′ is 2′-OMe or 2′-F, q⁵ is 7, T3′ is 2′-F, q⁶ is 1, B4′ is 2′-F, and q⁷ is 1; with two phosphorothioate internucleotide linkage modifications within position 1-5 of the sense strand (counting from the 5′-end of the sense strand), and two phosphorothioate internucleotide linkage modifications at positions 1 and 2 and two phosphorothioate internucleotide linkage modifications within positions 18-23 of the antisense strand (counting from the 5′-end of the antisense strand). The RNAi agent also comprises a 5′-PS and a targeting ligand. In one embodiment, the 5′-PS is at the 5′-end of the antisense strand, and the targeting ligand is at the 3′-end of the sense strand.

[0444] In one embodiment, B1 is 2′-OMe or 2′-F, n¹ is 8, T1 is 2′F, n² is 3, B2 is 2′-OMe, n³ is 7, n⁴ is 0, B3 is 2′-OMe, n⁵ is 3, B1′ is 2′-OMe or 2′-F, q¹ is 9, T1′ is 2′-F, q² is 1, B2′ is 2′-OMe or 2′-F, q³ is 4, q⁴ is 0, B3′ is 2′-OMe or 2′-F, q⁵ is 7, T3′ is 2′-F, q⁶ is 1, B4′ is 2′-F, and q⁷ is 1; with two phosphorothioate internucleotide linkage modifications within position 1-5 of the sense strand (counting from the 5′-end of the sense strand), and two phosphorothioate internucleotide linkage modifications at positions 1 and 2 and two phosphorothioate internucleotide linkage modifications within positions 18-23 of the antisense strand (counting from the 5′-end of the antisense strand). The RNAi agent also comprises a 5′-VP (e.g., a 5′-E-VP, 5′-Z-VP, or combination thereof) and a targeting ligand. In one embodiment, the 5′-VP is at the 5′-end of the antisense strand, and the targeting ligand is at the 3′-end of the sense strand.

[0445] In one embodiment, B1 is 2′-OMe or 2′-F, n¹ is 8, T1 is 2′F, n² is 3, B2 is 2′-OMe, n³ is 7, n⁴ is 0, B3 is 2′-OMe, n⁵ is 3, B1′ is 2′-OMe or 2′-F, q¹ is 9, T1′ is 2′-F, q² is 1, B2′ is 2′-OMe or 2′-F, q³ is 4, q⁴ is 0, B3′ is 2′-OMe or 2′-F, q⁵ is 7, T3′ is 2′-F, q⁶ is 1, B4′ is 2′-F, and q⁷ is 1; with two phosphorothioate internucleotide linkage modifications within position 1-5 of the sense strand (counting from the 5′-end of the sense strand), and two phosphorothioate internucleotide linkage modifications at positions 1 and 2 and two phosphorothioate internucleotide linkage modifications within positions 18-23 of the antisense strand (counting from the 5′-end of the antisense strand). The RNAi agent also comprises a 5′-PS₂ and a targeting ligand. In one embodiment, the 5′-PS₂ is at the 5′-end of the antisense strand, and the targeting ligand is at the 3′-end of the sense strand.

[0446] In one embodiment, B1 is 2′-OMe or 2′-F, n¹ is 8, T1 is 2′F, n² is 3, B2 is 2′-OMe, n³ is 7, n⁴ is 0, B3 is 2′-OMe, n⁵ is 3, B1′ is 2′-OMe or 2′-F, q¹ is 9, T1′ is 2′-F, q² is 1, B2′ is 2′-OMe or 2′-F, q³ is 4, q⁴ is 0, B3′ is 2′-OMe or 2′-F, q⁵ is 7, T3′ is 2′-F, q⁶ is 1, B4′ is 2′-F, and q⁷ is 1; with two phosphorothioate internucleotide linkage modifications within position 1-5 of the sense strand (counting from the 5′-end of the sense strand), and two phosphorothioate internucleotide linkage modifications at positions 1 and 2 and two phosphorothioate internucleotide linkage modifications within positions 18-23 of the antisense strand (counting from the 5′-end of the antisense strand). The RNAi agent also comprises a 5′-deoxy-5′-C-malonyl and a targeting ligand. In one embodiment, the 5′-deoxy-5′-C-malonyl is at the 5′-end of the antisense strand, and the targeting ligand is at the 3′-end of the sense strand.

[0447] In a particular embodiment, an RNAi agent of the present invention comprises:
[0448] (a) a sense strand having:
   [0449] (i) a length of 21 nucleotides;
   [0450] (ii) an ASGPR ligand attached to the 3′-end, wherein said ASGPR ligand comprises three GalNAc derivatives attached through a trivalent branched linker; and
   [0451] (iii) 2′-F modifications at positions 1, 3, 5, 7, 9 to 11, 13, 17, 19, and 21, and 2′-OMe modifications at positions 2, 4, 6, 8, 12, 14 to 16, 18, and 20 (counting from the 5′ end); and
[0452] (b) an antisense strand having:
   [0453] (i) a length of 23 nucleotides;
   [0454] (ii) 2′-OMe modifications at positions 1, 3, 5, 9, 11 to 13, 15, 17, 19, 21, and 23, and 2′F modifications at positions 2, 4, 6 to 8, 10, 14, 16, 18, 20, and 22 (counting from the 5′ end); and
   [0455] (iii) phosphorothioate internucleotide linkages between nucleotide positions 21 and 22, and between nucleotide positions 22 and 23 (counting from the 5′ end);
[0456] wherein the dsRNA agents have a two nucleotide overhang at the 3′-end of the antisense strand, and a blunt end at the 5′-end of the antisense strand.

[0457] In another particular embodiment, an RNAi agent of the present invention comprises:
[0458] (a) a sense strand having:
[0459] (i) a length of 21 nucleotides;
[0460] (ii) an ASGPR ligand attached to the 3′-end, wherein said ASGPR ligand comprises three GalNAc derivatives attached through a trivalent branched linker;
   [0461] (iii) 2′-F modifications at positions 1, 3, 5, 7, 9 to 11, 13, 15, 17, 19, and 21, and 2′-OMe modifications at positions 2, 4, 6, 8, 12, 14, 16, 18, and 20 (counting from the 5′ end); and
   [0462] (iv) phosphorothioate internucleotide linkages between nucleotide positions 1 and 2, and between nucleotide positions 2 and 3 (counting from the 5′ end);
[0463] and
[0464] (b) an antisense strand having:
   [0465] (i) a length of 23 nucleotides;
[0466] (ii) 2′-OMe modifications at positions 1, 3, 5, 7, 9, 11 to 13, 15, 17, 19, and 21 to 23, and 2′F modifications at positions 2, 4, 6, 8, 10, 14, 16, 18, and 20 (counting from the 5′ end); and
[0467] (iii) phosphorothioate internucleotide linkages between nucleotide positions 1 and 2, between nucleotide positions 2 and 3, between nucleotide positions 21 and 22, and between nucleotide positions 22 and 23 (counting from the 5′ end);
   wherein the RNAi agents have a two nucleotide overhang at the 3′-end of the antisense strand, and a blunt end at the 5′-end of the antisense strand.

[0468] In another particular embodiment, a RNAi agent of the present invention comprises:
[0469] (a) a sense strand having:
   [0470] (i) a length of 21 nucleotides;
[0471] (ii) an ASGPR ligand attached to the 3′-end, wherein said ASGPR ligand comprises three GalNAc derivatives attached through a trivalent branched linker;
   [0472] (iii) 2′-OMe modifications at positions 1 to 6, 8, 10, and 12 to 21, 2′-F modifications at positions 7, and 9, and a deoxy-nucleotide (e.g. dT) at position 11 (counting from the 5′ end); and
   [0473] (iv) phosphorothioate internucleotide linkages between nucleotide positions 1 and 2, and between nucleotide positions 2 and 3 (counting from the 5′ end);
[0474] and
[0475] (b) an antisense strand having:
   [0476] (i) a length of 23 nucleotides;
[0477] (ii) 2′-OMe modifications at positions 1, 3, 7, 9, 11, 13, 15, 17, and 19 to 23, and 2′-F modifications at positions 2, 4 to 6, 8, 10, 12, 14, 16, and 18 (counting from the 5′ end); and
[0478] (iii) phosphorothioate internucleotide linkages between nucleotide positions 1 and 2, between nucleotide positions 2 and 3, between nucleotide positions 21 and 22, and between nucleotide positions 22 and 23 (counting from the 5′ end);
   wherein the RNAi agents have a two nucleotide overhang at the 3′-end of the antisense strand, and a blunt end at the 5′-end of the antisense strand.

[0479] In another particular embodiment, a RNAi agent of the present invention comprises:
[0480] (a) a sense strand having:
   [0481] (i) a length of 21 nucleotides;
[0482] (ii) an ASGPR ligand attached to the 3′-end, wherein said ASGPR ligand comprises three GalNAc derivatives attached through a trivalent branched linker;
   [0483] (iii) 2′-OMe modifications at positions 1 to 6, 8, 10, 12, 14, and 16 to 21, and 2′-F modifications at positions 7, 9, 11, 13, and 15; and
   [0484] (iv) phosphorothioate internucleotide linkages between nucleotide positions 1 and 2, and between nucleotide positions 2 and 3 (counting from the 5′ end);
[0485] and
[0486] (b) an antisense strand having:
   [0487] (i) a length of 23 nucleotides;
[0488] (ii) 2′-OMe modifications at positions 1, 5, 7, 9, 11, 13, 15, 17, 19, and 21 to 23, and 2′-F modifications at positions 2 to 4, 6, 8, 10, 12, 14, 16, 18, and 20 (counting from the 5′ end); and
[0489] (iii) phosphorothioate internucleotide linkages between nucleotide positions 1 and 2, between nucleotide positions 2 and 3, between nucleotide positions 21 and 22, and between nucleotide positions 22 and 23 (counting from the 5′ end);
   wherein the RNAi agents have a two nucleotide overhang at the 3′-end of the antisense strand, and a blunt end at the 5′-end of the antisense strand.

[0490] In another particular embodiment, a RNAi agent of the present invention comprises:
[0491] (a) a sense strand having:
   [0492] (i) a length of 21 nucleotides;
[0493] (ii) an ASGPR ligand attached to the 3′-end, wherein said ASGPR ligand comprises three GalNAc derivatives attached through a trivalent branched linker;
   [0494] (iii) 2′-OMe modifications at positions 1 to 9, and 12 to 21, and 2′-F modifications at positions 10, and 11; and
   [0495] (iv) phosphorothioate internucleotide linkages between nucleotide positions 1 and 2, and between nucleotide positions 2 and 3 (counting from the 5′ end);
[0496] and
[0497] (b) an antisense strand having:
   [0498] (i) a length of 23 nucleotides;
[0499] (ii) 2′-OMe modifications at positions 1, 3, 5, 7, 9, 11 to 13, 15, 17, 19, and 21 to 23, and 2′-F modifications at positions 2, 4, 6, 8, 10, 14, 16, 18, and 20 (counting from the 5′ end); and
[0500] (iii) phosphorothioate internucleotide linkages between nucleotide positions 1 and 2, between nucleotide positions 2 and 3, between nucleotide positions 21 and 22, and between nucleotide positions 22 and 23 (counting from the 5′ end);
   wherein the RNAi agents have a two nucleotide overhang at the 3′-end of the antisense strand, and a blunt end at the 5′-end of the antisense strand.

[0501] In another particular embodiment, a RNAi agent of the present invention comprises:
[0502] (a) a sense strand having:
   [0503] (i) a length of 21 nucleotides;
[0504] (ii) an ASGPR ligand attached to the 3′-end, wherein said ASGPR ligand comprises three GalNAc derivatives attached through a trivalent branched linker;
   [0505] (iii) 2′-F modifications at positions 1, 3, 5, 7, 9 to 11, and 13, and 2′-OMe modifications at positions 2, 4, 6, 8, 12, and 14 to 21; and
   [0506] (iv) phosphorothioate internucleotide linkages between nucleotide positions 1 and 2, and between nucleotide positions 2 and 3 (counting from the 5′ end);
[0507] and
[0508] (b) an antisense strand having:
   [0509] (i) a length of 23 nucleotides;
[0510] (ii) 2′-OMe modifications at positions 1, 3, 5 to 7, 9, 11 to 13, 15, 17 to 19, and 21 to 23, and 2′-F modifications at positions 2, 4, 8, 10, 14, 16, and 20 (counting from the 5′ end); and
[0511] (iii) phosphorothioate internucleotide linkages between nucleotide positions 1 and 2, between nucleotide positions 2 and 3, between nucleotide positions 21 and 22, and between nucleotide positions 22 and 23 (counting from the 5′ end);
   wherein the RNAi agents have a two nucleotide overhang at the 3′-end of the antisense strand, and a blunt end at the 5′-end of the antisense strand.

[0512] In another particular embodiment, a RNAi agent of the present invention comprises:
[0513] (a) a sense strand having:
   [0514] (i) a length of 21 nucleotides;
[0515] (ii) an ASGPR ligand attached to the 3′-end, wherein said ASGPR ligand comprises three GalNAc derivatives attached through a trivalent branched linker;
   [0516] (iii) 2′-OMe modifications at positions 1, 2, 4, 6, 8, 12, 14, 15, 17, and 19 to 21, and 2′-F modifications at positions 3, 5, 7, 9 to 11, 13, 16, and 18; and
   [0517] (iv) phosphorothioate internucleotide linkages between nucleotide positions 1 and 2, and between nucleotide positions 2 and 3 (counting from the 5′ end);
[0518] and
[0519] (b) an antisense strand having:
   [0520] (i) a length of 25 nucleotides;
[0521] (ii) 2′-OMe modifications at positions 1, 4, 6, 7, 9, 11 to 13, 15, 17, and 19 to 23, 2′-F modifications at positions 2, 3, 5, 8, 10, 14, 16, and 18, and deoxy-nucleotides (e.g. dT) at positions 24 and 25 (counting from the 5′ end); and
   [0522] (iii) phosphorothioate internucleotide linkages between nucleotide positions 1 and 2, between nucleotide positions 2 and 3, between nucleotide positions 21 and 22, and between nucleotide positions 22 and 23 (counting from the 5′ end);
      wherein the RNAi agents have a four nucleotide overhang at the 3′-end of the antisense strand, and a blunt end at the 5′-end of the antisense strand.

[0523] In another particular embodiment, a RNAi agent of the present invention comprises:
[0524] (a) a sense strand having:
   [0525] (i) a length of 21 nucleotides;
[0526] (ii) an ASGPR ligand attached to the 3′-end, wherein said ASGPR ligand comprises three GalNAc derivatives attached through a trivalent branched linker;
   [0527] (iii) 2′-OMe modifications at positions 1 to 6, 8, and 12 to 21, and 2′-F modifications at positions 7, and 9 to 11; and
   [0528] (iv) phosphorothioate internucleotide linkages between nucleotide positions 1 and 2, and between nucleotide positions 2 and 3 (counting from the 5′ end);
[0529] and
[0530] (b) an antisense strand having:
   [0531] (i) a length of 23 nucleotides;
[0532] (ii) 2′-OMe modifications at positions 1, 3 to 5, 7, 8, 10 to 13, 15, and 17 to 23, and 2′-F modifications at positions 2, 6, 9, 14, and 16 (counting from the 5′ end); and
[0533] (iii) phosphorothioate internucleotide linkages between nucleotide positions 1 and 2, between nucleotide positions 2 and 3, between nucleotide positions 21 and 22, and between nucleotide positions 22 and 23 (counting from the 5′ end);
   wherein the RNAi agents have a two nucleotide overhang at the 3′-end of the antisense strand, and a blunt end at the 5′-end of the antisense strand.

[0534] In another particular embodiment, a RNAi agent of the present invention comprises:
[0535] (a) a sense strand having:
   [0536] (i) a length of 21 nucleotides;
[0537] (ii) an ASGPR ligand attached to the 3′-end, wherein said ASGPR ligand comprises three GalNAc derivatives attached through a trivalent branched linker;
   [0538] (iii) 2′-OMe modifications at positions 1 to 6, 8, and 12 to 21, and 2′-F modifications at positions 7, and 9 to 11; and
   [0539] (iv) phosphorothioate internucleotide linkages between nucleotide positions 1 and 2, and between nucleotide positions 2 and 3 (counting from the 5′ end);
[0540] and
[0541] (b) an antisense strand having:
   [0542] (i) a length of 23 nucleotides;
[0543] (ii) 2′-OMe modifications at positions 1, 3 to 5, 7, 10 to 13, 15, and 17 to 23, and 2′-F modifications at positions 2, 6, 8, 9, 14, and 16 (counting from the 5′ end); and
[0544] (iii) phosphorothioate internucleotide linkages between nucleotide positions 1 and 2, between nucleotide positions 2 and 3, between nucleotide positions 21 and 22, and between nucleotide positions 22 and 23 (counting from the 5′ end);
   wherein the RNAi agents have a two nucleotide overhang at the 3′-end of the antisense strand, and a blunt end at the 5′-end of the antisense strand.

[0545] In another particular embodiment, a RNAi agent of the present invention comprises:
[0546] (a) a sense strand having:
   [0547] (i) a length of 19 nucleotides;
[0548] (ii) an ASGPR ligand attached to the 3′-end, wherein said ASGPR ligand comprises three GalNAc derivatives attached through a trivalent branched linker;
   [0549] (iii) 2′-OMe modifications at positions 1 to 4, 6, and 10 to 19, and 2′-F modifications at positions 5, and 7 to 9; and
   [0550] (iv) phosphorothioate internucleotide linkages between nucleotide positions 1 and 2, and between nucleotide positions 2 and 3 (counting from the 5′ end);
[0551] and
[0552] (b) an antisense strand having:
   [0553] (i) a length of 21 nucleotides;
[0554] (ii) 2′-OMe modifications at positions 1, 3 to 5, 7, 10 to 13, 15, and 17 to 21, and 2′-F modifications at positions 2, 6, 8, 9, 14, and 16 (counting from the 5′ end); and
[0555] (iii) phosphorothioate internucleotide linkages between nucleotide positions 1 and 2, between nucleotide positions 2 and 3, between nucleotide positions 19 and 20, and between nucleotide positions 20 and 21 (counting from the 5′ end);
   wherein the RNAi agents have a two nucleotide overhang at the 3′-end of the antisense strand, and a blunt end at the 5′-end of the antisense strand.

[0556] In certain embodiments, the iRNA for use in the methods of the invention is an agent selected from agents listed in any one of Tables 2, 3, 5, and 6. These agents may further comprise a ligand.

### III. iRNAs Conjugated to Ligands

[0557] Another modification of the RNA of an iRNA of the invention involves chemically linking to the iRNA one or more ligands, moieties or conjugates that enhance the activity, cellular distribution, or cellular uptake of the iRNA e.g., into a cell. Such moieties include but are not limited to lipid moieties such as a cholesterol moiety (Letsinger et al., Proc. Natl. Acid. Sci. USA, 1989, 86: 6553-6556). In other embodiments, the ligand is cholic acid (Manoharan et al., Biorg. Med. Chem. Let., 1994, 4:1053-1060), a thioether, e.g., beryl-S-tritylthiol (Manoharan et al., Ann. N.Y. Acad. Sci., 1992, 660:306-309; Manoharan et al., Biorg. Med. Chem. Let., 1993, 3:2765-2770), a thiocholesterol (Oberhauser et al., Nucl. Acids Res., 1992, 20:533-538), an aliphatic chain, e.g., dodecandiol or undecyl residues (Saison-Behmoaras et al., EMBO J, 1991, 10:1111-1118; Kabanov et al., FEBS Lett., 1990, 259:327-330; Svinarchuk et al., Biochimie, 1993, 75:49-54), a phospholipid, e.g., di-hexadecyl-rac-glycerol or triethyl-ammonium 1,2-di-O-hexadecyl-rac-glycero-3-phosphonate (Manoharan et al., Tetrahedron Lett., 1995, 36:3651-3654; Shea et al., Nucl. Acids Res., 1990, 18:3777-3783), a polyamine or a polyethylene glycol chain (Manoharan et al., Nucleosides & Nucleotides, 1995, 14:969-973), or adamantane acetic acid (Manoharan et al., Tetrahedron Lett., 1995, 36:3651-3654), a palmityl moiety (Mishra et al., Biochim. Biophys. Acta, 1995, 1264:229-237), or an octadecylamine or hexylamino-carbonyloxycholesterol moiety (Crooke et al., J. Pharmacol. Exp. Ther., 1996, 277:923-937).

[0558] In certain embodiments, a ligand alters the distribution, targeting, or lifetime of an iRNA agent into which it is incorporated. In some embodiments a ligand provides an enhanced affinity for a selected target, e.g., molecule, cell or cell type, compartment, e.g., a cellular or organ compartment, tissue, organ or region of the body, as, e.g., compared to a species absent such a ligand. In some embodiments, ligands do not take part in duplex pairing in a duplexed nucleic acid.

[0559] Ligands can include a naturally occurring substance, such as a protein (e.g., human serum albumin (HSA), low-density lipoprotein (LDL), or globulin); carbohydrate (e.g., a dextran, pullulan, chitin, chitosan, inulin, cyclodextrin, N-acetylglucosamine, N-acetylgalactosamine, or hyaluronic acid); or a lipid. The ligand can also be a recombinant or synthetic molecule, such as a synthetic polymer, e.g., a synthetic polyamino acid. Examples of polyamino acids include polyamino acid is a polylysine (PLL), poly L-aspartic acid, poly L-glutamic acid, styrene-maleic acid anhydride copolymer, poly(L-lactide-co-glycolied) copolymer, divinyl ether-maleic anhydride copolymer, N-(2-hydroxypropyl)methacrylamide copolymer (HMPA), polyethylene glycol (PEG), polyvinyl alcohol (PVA), polyurethane, poly(2-ethylacryllic acid), N-isopropylacrylamide polymers, or polyphosphazine. Example of polyamines include: polyethylenimine, polylysine (PLL), spermine, spermidine, polyamine, pseudopeptide-polyamine, peptidomimetic polyamine, dendrimer polyamine, arginine, amidine, protamine, cationic lipid, cationic porphyrin, quaternary salt of a polyamine, or an alpha helical peptide.

[0560] Ligands can also include targeting groups, e.g., a cell or tissue targeting agent, e.g., a lectin, glycoprotein, lipid or protein, e.g., an antibody, that binds to a specified cell type such as a kidney cell. A targeting group can be a thyrotropin, melanotropin, lectin, glycoprotein, surfactant protein A, Mucin carbohydrate, multivalent lactose, multivalent galactose, N-acetyl-galactosamine, N-acetyl-glucosamine multivalent mannose, multivalent fucose, glycosylated polyaminoacids, multivalent galactose, transferrin, bisphosphonate, polyglutamate, polyaspartate, a lipid, cholesterol, a steroid, bile acid, folate, vitamin B12, vitamin A, biotin, or an RGD peptide or RGD peptide mimetic. In certain embodiments, the ligand is a multivalent galactose, e.g., an N-acetyl-galactosamine.

[0561] Other examples of ligands include dyes, intercalating agents (e.g. acridines), cross-linkers (e.g. psoralene, mitomycin C), porphyrins (TPPC4, texaphyrin, Sapphyrin), polycyclic aromatic hydrocarbons (e.g., phenazine, dihydrophenazine), artificial endonucleases (e.g. EDTA), lipophilic molecules, e.g., cholesterol, cholic acid, adamantane acetic acid, 1-pyrene butyric acid, dihydrotestosterone, 1,3-Bis-O(hexadecyl)glycerol, geranyloxyhexyl group, hexadecylglycerol, borneol, menthol, 1,3-propanediol, heptadecyl group, palmitic acid, myristic acid,O3-(oleoyl)lithocholic acid, O3-(oleoyl)cholenic acid, dimethoxytrityl, or phenoxazine) and peptide conjugates (e.g., antennapedia peptide, Tat peptide), alkylating agents, phosphate, amino, mercapto, PEG (e.g., PEG-40K), MPEG, [MPEG]₂, polyamino, alkyl, substituted alkyl, radiolabeled markers, enzymes, haptens (e.g. biotin), transport/absorption facilitators (e.g., aspirin, vitamin E, folic acid), synthetic ribonucleases (e.g., imidazole, bisimidazole, histamine, imidazole clusters, acridine-imidazole conjugates, Eu3+ complexes of tetraazamacrocycles), dinitrophenyl, HRP, or AP.

[0562] Ligands can be proteins, e.g., glycoproteins, or peptides, e.g., molecules having a specific affinity for a co-ligand, or antibodies e.g., an antibody, that binds to a specified cell type such as a hepatic cell. Ligands can also include hormones and hormone receptors. They can also include non-peptidic species, such as lipids, lectins, carbohydrates, vitamins, cofactors, multivalent lactose, multivalent galactose, N-acetyl-galactosamine, N-acetyl-glucosamine multivalent mannose, or multivalent fucose. The ligand can be, for example, a lipopolysaccharide, an activator of p38 MAP kinase, or an activator of NF-κB.

[0563] The ligand can be a substance, e.g., a drug, which can increase the uptake of the iRNA agent into the cell, for example, by disrupting the cell's cytoskeleton, e.g., by disrupting the cell's microtubules, microfilaments, or intermediate filaments. The drug can be, for example, taxol, vincristine, vinblastine, cytochalasin, nocodazole, japlakinolide, latrunculin A, phalloidin, swinholide A, indanocine, or myoservin.

[0564] In some embodiments, a ligand attached to an iRNA as described herein acts as a pharmacokinetic modulator (PK modulator). PK modulators include lipophiles, bile acids, steroids, phospholipid analogues, peptides, protein binding agents, PEG, vitamins, etc. Exemplary PK modulators include, but are not limited to, cholesterol, fatty acids, cholic acid, lithocholic acid, dialkylglycerides, diacylglyceride, phospholipids, sphingolipids, naproxen, ibuprofen, vitamin E, biotin. Oligonucleotides that comprise a number of phosphorothioate linkages are also known to bind to serum protein, thus short oligonucleotides, e.g., oligonucleotides of about 5 bases, 10 bases, 15 bases, or 20 bases, comprising multiple of phosphorothioate linkages in the backbone are also amenable to the present invention as ligands (e.g. as PK modulating ligands). In addition, aptamers that bind serum components (e.g. serum proteins) are also suitable for use as PK modulating ligands in the embodiments described herein.

[0565] Ligand-conjugated iRNAs of the invention may be synthesized by the use of an oligonucleotide that bears a pendant reactive functionality, such as that derived from the attachment of a linking molecule onto the oligonucleotide (described below). This reactive oligonucleotide may be reacted directly with commercially-available ligands, ligands that are synthesized bearing any of a variety of protecting groups, or ligands that have a linking moiety attached thereto.

[0566] The oligonucleotides used in the conjugates of the present invention may be conveniently and routinely made through the well-known technique of solid-phase synthesis. Equipment for such synthesis is sold by several vendors including, for example, Applied Biosystems® (Foster City, Calif.). Any other methods for such synthesis known in the art may additionally or alternatively be employed. It is also known to use similar techniques to prepare other oligonucleotides, such as the phosphorothioates and alkylated derivatives.

[0567] In the ligand-conjugated iRNAs and ligand-molecule bearing sequence-specific linked nucleosides of the present invention, the oligonucleotides and oligonucleosides may be assembled on a suitable DNA synthesizer utilizing standard nucleotide or nucleoside precursors, or nucleotide or nucleoside conjugate precursors that already bear the linking moiety, ligand-nucleotide or nucleoside-conjugate precursors that already bear the ligand molecule, or non-nucleoside ligand-bearing building blocks.

[0568] When using nucleotide-conjugate precursors that already bear a linking moiety, the synthesis of the sequence-specific linked nucleosides is typically completed, and the ligand molecule is then reacted with the linking moiety to form the ligand-conjugated oligonucleotide. In some embodiments, the oligonucleotides or linked nucleosides of the present invention are synthesized by an automated synthesizer using phosphoramidites derived from ligand-nucleoside conjugates in addition to the standard phosphoramidites and non-standard phosphoramidites that are commercially available and routinely used in oligonucleotide synthesis.

[0569] A. Lipid Conjugates

[0570] In certain embodiments, the ligand or conjugate is a lipid or lipid-based molecule. In one embodiment, such a lipid or lipid-based molecule binds a serum protein, e.g., human serum albumin (HSA). An HSA binding ligand allows for distribution of the conjugate to a target tissue, e.g., a non-kidney target tissue of the body. For example, the target tissue can be the liver, including parenchymal cells of the liver. Other molecules that can bind HSA can also be used as ligands. For example, naproxen or aspirin can be used. A lipid or lipid-based ligand can (a) increase resistance to degradation of the conjugate, (b) increase targeting or transport into a target cell or cell membrane, or (c) can be used to adjust binding to a serum protein, e.g., HSA.

[0571] A lipid based ligand can be used to inhibit, e.g., control the binding of the conjugate to a target tissue. For example, a lipid or lipid-based ligand that binds to HSA more strongly will be less likely to be targeted to the kidney and therefore less likely to be cleared from the body. A lipid or lipid-based ligand that binds to HSA less strongly can be used to target the conjugate to the kidney.

[0572] In certain embodiments, the lipid based ligand binds HSA. In one embodiment, it binds HSA with a sufficient affinity such that the conjugate will be distributed to a non-kidney tissue. However, it is preferred that the affinity not be so strong that the HSA-ligand binding cannot be reversed.

[0573] In other embodiments, the lipid based ligand binds HSA weakly or not at all. In one embodiment, the conjugate will be distributed to the kidney. Other moieties that target to kidney cells can also be used in place of, or in addition to, the lipid based ligand.

[0574] In another aspect, the ligand is a moiety, e.g., a vitamin, which is taken up by a target cell, e.g., a proliferating cell. These are particularly useful for treating disorders characterized by unwanted cell proliferation, e.g., of the malignant or non-malignant type, e.g., cancer cells. Exemplary vitamins include vitamin A, E, and K. Other exemplary vitamins include are B vitamin, e.g., folic acid, B12, riboflavin, biotin, pyridoxal or other vitamins or nutrients taken up by target cells such as liver cells. Also included are HSA and low density lipoprotein (LDL).

[0575] B. Cell Permeation Agents

[0576] In another aspect, the ligand is a cell-permeation agent, such as, a helical cell-permeation agent. In one embodiment, the agent is amphipathic. An exemplary agent is a peptide such as tat or antennopedia. If the agent is a peptide, it can be modified, including a peptidylmimetic, invertomers, non-peptide or pseudo-peptide linkages, and use of D-amino acids. In one embodiment, the helical agent is an alpha-helical agent, which has a lipophilic and a lipophobic phase.

[0577] The ligand can be a peptide or peptidomimetic. A peptidomimetic (also referred to herein as an oligopeptidomimetic) is a molecule capable of folding into a defined three-dimensional structure similar to a natural peptide. The attachment of peptide and peptidomimetics to iRNA agents can affect pharmacokinetic distribution of the iRNA, such as by enhancing cellular recognition and absorption. The peptide or peptidomimetic moiety can be about 5-50 amino acids long, e.g., about 5, 10, 15, 20, 25, 30, 35, 40, 45, or 50 amino acids long.

[0578] A peptide or peptidomimetic can be, for example, a cell permeation peptide, cationic peptide, amphipathic peptide, or hydrophobic peptide (e.g., consisting primarily of Tyr, Trp, or Phe). The peptide moiety can be a dendrimer peptide, constrained peptide or crosslinked peptide. In another alternative, the peptide moiety can include a hydrophobic membrane translocation sequence (MTS). An exemplary hydrophobic MTS-containing peptide is RFGF having the amino acid sequence AAVALLPAVLLALLAP (SEQ ID NO: 14). An RFGF analogue (e.g., amino acid sequence AALLPVLLAAP (SEQ ID NO:15) containing a hydrophobic MTS can also be a targeting moiety. The peptide moiety can be a “delivery” peptide, which can carry large polar molecules including peptides, oligonucleotides, and protein across cell membranes. For example, sequences from the HIV Tat protein (GRKKRRQRRRPPQ (SEQ ID NO:16) and the Drosophila Antennapedia protein (RQIKIWFQNRRMKWKK (SEQ ID NO:17) have been found to be capable of functioning as delivery peptides. A peptide or peptidomimetic can be encoded by a random sequence of DNA, such as a peptide identified from a phage-display library, or one-bead-one-compound (OBOC) combinatorial library (Lam et al., Nature, 354:82-84, 1991). Examples of a peptide or peptidomimetic tethered to a dsRNA agent via an incorporated monomer unit for cell targeting purposes is an arginine-glycine-aspartic acid (RGD)-peptide, or RGD mimic. A peptide moiety can range in length from about 5 amino acids to about 40 amino acids. The peptide moieties can have a structural modification, such as to increase stability or direct conformational properties. Any of the structural modifications described below can be utilized.

[0579] An RGD peptide for use in the compositions and methods of the invention may be linear or cyclic, and may be modified, e.g., glycosylated or methylated, to facilitate targeting to a specific tissue(s). RGD-containing peptides and peptidiomimemtics may include D-amino acids, as well as synthetic RGD mimics. In addition to RGD, one can use other moieties that target the integrin ligand, e.g., PECAM-1 or VEGF.

[0580] A “cell permeation peptide” is capable of permeating a cell, e.g., a microbial cell, such as a bacterial or fungal cell, or a mammalian cell, such as a human cell. A microbial cell-permeating peptide can be, for example, an α-helical linear peptide (e.g., LL-37 or Ceropin P1), a disulfide bond-containing peptide (e.g., α-defensin, β-defensin or bactenecin), or a peptide containing only one or two dominating amino acids (e.g., PR-39 or indolicidin). A cell permeation peptide can also include a nuclear localization signal (NLS). For example, a cell permeation peptide can be a bipartite amphipathic peptide, such as MPG, which is derived from the fusion peptide domain of HIV-1 gp41 and the NLS of SV40 large T antigen (Simeoni et al., Nucl. Acids Res. 31:2717-2724, 2003).

[0581] C. Carbohydrate Conjugates

[0582] In some embodiments of the compositions and methods of the invention, an iRNA further comprises a carbohydrate. The carbohydrate conjugated iRNA is advantageous for the in vivo delivery of nucleic acids, as well as compositions suitable for in vivo therapeutic use, as described herein. As used herein, “carbohydrate” refers to a compound which is either a carbohydrate per se made up of one or more monosaccharide units having at least 6 carbon atoms (which can be linear, branched or cyclic) with an oxygen, nitrogen or sulfur atom bonded to each carbon atom; or a compound having as a part thereof a carbohydrate moiety made up of one or more monosaccharide units each having at least six carbon atoms (which can be linear, branched or cyclic), with an oxygen, nitrogen or sulfur atom bonded to each carbon atom. Representative carbohydrates include the sugars (mono-, di-, tri-, and oligosaccharides containing from about 4, 5, 6, 7, 8, or 9 monosaccharide units), and polysaccharides such as starches, glycogen, cellulose and polysaccharide gums. Specific monosaccharides include C5 and above (e.g., C5, C6, C7, or C8) sugars; di- and trisaccharides include sugars having two or three monosaccharide units (e.g., C5, C6, C7, or C8).

[0583] In certain embodiments, a carbohydrate conjugate for use in the compositions and methods of the invention is a monosaccharide.

[0584] In certain embodiments, the monosaccharide is an N-acetylgalactosamine (GalNAc). GalNAc conjugates, which comprise one or more N-acetylgalactosamine (GalNAc) derivatives, are described, for example, in U.S. Pat. No. 8,106,022, the entire content of which is hereby incorporated herein by reference. In some embodiments, the GalNAc conjugate serves as a ligand that targets the iRNA to particular cells. In some embodiments, the GalNAc conjugate targets the iRNA to liver cells, e.g., by serving as a ligand for the asialoglycoprotein receptor of liver cells (e.g., hepatocytes).

[0585] In some embodiments, the carbohydrate conjugate comprises one or more GalNAc derivatives. The GalNAc derivatives may be attached via a linker, e.g., a bivalent or trivalent branched linker. In some embodiments the GalNAc conjugate is conjugated to the 3′ end of the sense strand. In some embodiments, the GalNAc conjugate is conjugated to the iRNA agent (e.g., to the 3′ end of the sense strand) via a linker, e.g., a linker as described herein. In some embodiments the GalNAc conjugate is conjugated to the 5′ end of the sense strand. In some embodiments, the GalNAc conjugate is conjugated to the iRNA agent (e.g., to the 5′ end of the sense strand) via a linker, e.g., a linker as described herein.

[0586] In certain embodiments of the invention, the GalNAc or GalNAc derivative is attached to an iRNA agent of the invention via a monovalent linker. In some embodiments, the GalNAc or GalNAc derivative is attached to an iRNA agent of the invention via a bivalent linker. In yet other embodiments of the invention, the GalNAc or GalNAc derivative is attached to an iRNA agent of the invention via a trivalent linker. In other embodiments of the invention, the GalNAc or GalNAc derivative is attached to an iRNA agent of the invention via a tetravalent linker.

[0587] In certain embodiments, the double stranded RNAi agents of the invention comprise one GalNAc or GalNAc derivative attached to the iRNA agent. In certain embodiments, the double stranded RNAi agents of the invention comprise a plurality (e.g., 2, 3, 4, 5, or 6) GalNAc or GalNAc derivatives, each independently attached to a plurality of nucleotides of the double stranded RNAi agent through a plurality of monovalent linkers.

[0588] In some embodiments, for example, when the two strands of an iRNA agent of the invention are part of one larger molecule connected by an uninterrupted chain of nucleotides between the 3′-end of one strand and the 5′-end of the respective other strand forming a hairpin loop comprising, a plurality of unpaired nucleotides, each unpaired nucleotide within the hairpin loop may independently comprise a GalNAc or GalNAc derivative attached via a monovalent linker. The hairpin loop may also be formed by an extended overhang in one strand of the duplex.

[0589] In some embodiments, for example, when the two strands of an iRNA agent of the invention are part of one larger molecule connected by an uninterrupted chain of nucleotides between the 3′-end of one strand and the 5′-end of the respective other strand forming a hairpin loop comprising, a plurality of unpaired nucleotides, each unpaired nucleotide within the hairpin loop may independently comprise a GalNAc or GalNAc derivative attached via a monovalent linker. The hairpin loop may also be formed by an extended overhang in one strand of the duplex.

[0590] In one embodiment, a carbohydrate conjugate for use in the compositions and methods of the invention is selected from the group consisting of:

[chemical structure]

[chemical structure]

[chemical structure]

[chemical structure]

[chemical structure]

wherein Y is O or S and n is 3-6 (Formula XXIV);

[chemical structure]

wherein Y is O or S and n is 3-6 (Formula XXV);

[chemical structure]

wherein X is O or S (Formula XXVII);

[chemical structure]

[chemical structure]

[chemical structure]

[0591] In another embodiment, a carbohydrate conjugate for use in the compositions and methods of the invention is a monosaccharide. In one embodiment, the monosaccharide is an N-acetylgalactosamine, such as

[chemical structure]

[0592] In some embodiments, the RNAi agent is attached to the carbohydrate conjugate via a linker as shown in the following schematic, wherein X is O or S.

[chemical structure]

[0593] In some embodiments, the RNAi agent is conjugated to L96 as defined in Table 1 and shown below:

[chemical structure]

[0594] Another representative carbohydrate conjugate for use in the embodiments described herein includes, but is not limited to,

[chemical structure]

(Formula XXXVI), when one of X or Y is an oligonucleotide, the other is a hydrogen.

[0595] In some embodiments, a suitable ligand is a ligand disclosed in WO 2019/055633, the entire contents of which are incorporated herein by reference. In one embodiment the ligand comprises the structure below:

[chemical structure]

[0596] In certain embodiments of the invention, the GalNAc or GalNAc derivative is attached to an iRNA agent of the invention via a monovalent linker. In some embodiments, the GalNAc or GalNAc derivative is attached to an iRNA agent of the invention via a bivalent linker. In yet other embodiments of the invention, the GalNAc or GalNAc derivative is attached to an iRNA agent of the invention via a trivalent linker.

[0597] In one embodiment, the double stranded RNAi agents of the invention comprise one or more GalNAc or GalNAc derivative attached to the iRNA agent. The GalNAc may be attached to any nucleotide via a linker on the sense strand or antisense strand. The GalNac may be attached to the 5′-end of the sense strand, the 3′ end of the sense strand, the 5′-end of the antisense strand, or the 3′-end of the antisense strand. In one embodiment, the GalNAc is attached to the 3′ end of the sense strand, e.g., via a trivalent linker.

[0598] In other embodiments, the double stranded RNAi agents of the invention comprise a plurality (e.g., 2, 3, 4, 5, or 6) GalNAc or GalNAc derivatives, each independently attached to a plurality of nucleotides of the double stranded RNAi agent through a plurality of linkers, e.g., monovalent linkers.

[0599] In some embodiments, for example, when the two strands of an iRNA agent of the invention is part of one larger molecule connected by an uninterrupted chain of nucleotides between the 3′-end of one strand and the 5′-end of the respective other strand forming a hairpin loop comprising, a plurality of unpaired nucleotides, each unpaired nucleotide within the hairpin loop may independently comprise a GalNAc or GalNAc derivative attached via a monovalent linker.

[0600] In some embodiments, the carbohydrate conjugate further comprises one or more additional ligands as described above, such as, but not limited to, a PK modulator or a cell permeation peptide.

[0601] Additional carbohydrate conjugates and linkers suitable for use in the present invention include those described in PCT Publication Nos. WO 2014/179620 and WO 2014/179627, the entire contents of each of which are incorporated herein by reference.

[0602] D. Linkers

[0603] In some embodiments, the conjugate or ligand described herein can be attached to an iRNA oligonucleotide with various linkers that can be cleavable or non-cleavable.

[0604] The term “linker” or “linking group” means an organic moiety that connects two parts of a compound, e.g., covalently attaches two parts of a compound. Linkers typically comprise a direct bond or an atom such as oxygen or sulfur, a unit such as NR8, C(O), C(O)NH, SO, SO₂, SO₂NH or a chain of atoms, such as, but not limited to, substituted or unsubstituted alkyl, substituted or unsubstituted alkenyl, substituted or unsubstituted alkynyl, arylalkyl, arylalkenyl, arylalkynyl, heteroarylalkyl, heteroarylalkenyl, heteroarylalkynyl, heterocyclylalkyl, heterocyclylalkenyl, heterocyclylalkynyl, aryl, heteroaryl, heterocyclyl, cycloalkyl, cycloalkenyl, alkylarylalkyl, alkylarylalkenyl, alkylarylalkynyl, alkenylarylalkyl, alkenylarylalkenyl, alkenylarylalkynyl, alkynylarylalkyl, alkynylarylalkenyl, alkynylarylalkynyl, alkylheteroarylalkyl, alkylheteroarylalkenyl, alkylheteroarylalkynyl, alkenylheteroarylalkyl, alkenylheteroarylalkenyl, alkenylheteroarylalkynyl, alkynylheteroarylalkyl, alkynylheteroarylalkenyl, alkynylheteroarylalkynyl, alkylheterocyclylalkyl, alkylheterocyclylalkenyl, alkylhererocyclylalkynyl, alkenylheterocyclylalkyl, alkenylheterocyclylalkenyl, alkenylheterocyclylalkynyl, alkynylheterocyclylalkyl, alkynylheterocyclylalkenyl, alkynylheterocyclylalkynyl, alkylaryl, alkenylaryl, alkynylaryl, alkylheteroaryl, alkenylheteroaryl, alkynylhereroaryl, which one or more methylenes can be interrupted or terminated by O, S, S(O), SO₂, N(R8), C(O), substituted or unsubstituted aryl, substituted or unsubstituted heteroaryl, or substituted or unsubstituted heterocyclic; where R8 is hydrogen, acyl, aliphatic, or substituted aliphatic. In one embodiment, the linker is about 1-24 atoms, 2-24, 3-24, 4-24, 5-24, 6-24, 6-18, 7-18, 8-18, 7-17, 8-17, 6-16, 7-17, or 8-16 atoms.

[0605] A cleavable linking group is one which is sufficiently stable outside the cell, but which upon entry into a target cell is cleaved to release the two parts the linker is holding together. In an exemplary embodiment, the cleavable linking group is cleaved at least about 10 times, 20, times, 30 times, 40 times, 50 times, 60 times, 70 times, 80 times, 90 times, or more, or at least 100 times faster in a target cell or under a first reference condition (which can, e.g., be selected to mimic or represent intracellular conditions) than in the blood of a subject, or under a second reference condition (which can, e.g., be selected to mimic or represent conditions found in the blood or serum).

[0606] Cleavable linking groups are susceptible to cleavage agents, e.g., pH, redox potential, or the presence of degradative molecules. Generally, cleavage agents are more prevalent or found at higher levels or activities inside cells than in serum or blood. Examples of such degradative agents include: redox agents which are selected for particular substrates or which have no substrate specificity, including, e.g., oxidative or reductive enzymes or reductive agents such as mercaptans, present in cells, that can degrade a redox cleavable linking group by reduction; esterases; endosomes or agents that can create an acidic environment, e.g., those that result in a pH of five or lower; enzymes that can hydrolyze or degrade an acid cleavable linking group by acting as a general acid, peptidases (which can be substrate specific), and phosphatases.

[0607] A cleavable linkage group, such as a disulfide bond can be susceptible to pH. The pH of human serum is 7.4, while the average intracellular pH is slightly lower, ranging from about 7.1-7.3. Endosomes have a more acidic pH, in the range of 5.5-6.0, and lysosomes have an even more acidic pH at around 5.0. Some linkers will have a cleavable linking group that is cleaved at a selected pH, thereby releasing a cationic lipid from the ligand inside the cell, or into the desired compartment of the cell.

[0608] A linker can include a cleavable linking group that is cleavable by a particular enzyme. The type of cleavable linking group incorporated into a linker can depend on the cell to be targeted. For example, a liver-targeting ligand can be linked to a cationic lipid through a linker that includes an ester group. Liver cells are rich in esterases, and therefore the linker will be cleaved more efficiently in liver cells than in cell types that are not esterase-rich. Other cell-types rich in esterases include cells of the lung, renal cortex, and testis.

[0609] Linkers that contain peptide bonds can be used when targeting cell types rich in peptidases, such as liver cells and synoviocytes.

[0610] In general, the suitability of a candidate cleavable linking group can be evaluated by testing the ability of a degradative agent (or condition) to cleave the candidate linking group. It will also be desirable to also test the candidate cleavable linking group for the ability to resist cleavage in the blood or when in contact with other non-target tissue. Thus, one can determine the relative susceptibility to cleavage between a first and a second condition, where the first is selected to be indicative of cleavage in a target cell and the second is selected to be indicative of cleavage in other tissues or biological fluids, e.g., blood or serum. The evaluations can be carried out in cell free systems, in cells, in cell culture, in organ or tissue culture, or in whole animals. It can be useful to make initial evaluations in cell-free or culture conditions and to confirm by further evaluations in whole animals. In certain embodiments, useful candidate compounds are cleaved at least about 2, 4, 10, 20, 30, 40, 50, 60, 70, 80, 90, or 100 times faster in the cell (or under in vitro conditions selected to mimic intracellular conditions) as compared to blood or serum (or under in vitro conditions selected to mimic extracellular conditions).

[0611] i. Redox Cleavable Linking Groups

[0612] In certain embodiments, a cleavable linking group is a redox cleavable linking group that is cleaved upon reduction or oxidation. An example of reductively cleavable linking group is a disulphide linking group (—S—S—). To determine if a candidate cleavable linking group is a suitable “reductively cleavable linking group,” or for example is suitable for use with a particular iRNA moiety and particular targeting agent one can look to methods described herein. For example, a candidate can be evaluated by incubation with dithiothreitol (DTT), or other reducing agent using reagents know in the art, which mimic the rate of cleavage which would be observed in a cell, e.g., a target cell. The candidates can also be evaluated under conditions which are selected to mimic blood or serum conditions. In one, candidate compounds are cleaved by at most about 10% in the blood. In other embodiments, useful candidate compounds are degraded at least about 2, 4, 10, 20, 30, 40, 50, 60, 70, 80, 90, or about 100 times faster in the cell (or under in vitro conditions selected to mimic intracellular conditions) as compared to blood (or under in vitro conditions selected to mimic extracellular conditions). The rate of cleavage of candidate compounds can be determined using standard enzyme kinetics assays under conditions chosen to mimic intracellular media and compared to conditions chosen to mimic extracellular media.

[0613] ii. Phosphate-Based Cleavable Linking Groups

[0614] In other embodiments, a cleavable linker comprises a phosphate-based cleavable linking group. A phosphate-based cleavable linking group is cleaved by agents that degrade or hydrolyze the phosphate group. An example of an agent that cleaves phosphate groups in cells are enzymes such as phosphatases in cells. Examples of phosphate-based linking groups are —O—P(O)(ORk)-O—, —O—P(S)(ORk)-O—, —O—P(S)(SRk)-O—, —S—P(O)(ORk)-O—, —O—P(O)(ORk)-S—, —S—P(O)(ORk)-S—, —O—P(S)(ORk)-S—, —S—P(S)(ORk)-O—, —O—P(O)(Rk)-O—, —O—P(S)(Rk)-O—, —S—P(O)(Rk)-O—, —S—P(S)(Rk)-O—, —S—P(O)(Rk)-S—, —O—P(S)(Rk)-S—, wherein Rk at each occurrence can be, independently, C1-C20 alkyl, C1-C20 haloalkyl, C6-C10 aryl, or C7-C12 aralkyl. Exemplary embodiments include —O—P(O)(OH)—O—, —O—P(S)(OH)—O—, —O—P(S)(SH)—O—, —S—P(O)(OH)—O—, —O—P(O)(OH)—S—, —S—P(O)(OH)—S—, —O—P(S)(OH)—S—, —S—P(S)(OH)—O—, —O—P(O)(H)—O—, —O—P(S)(H)—O—, —S—P(O)(H)—O, —S—P(S)(H)—O—, —S—P(O)(H)—S—, and —O—P(S)(H)—S—. In certain embodiments a phosphate-based linking group is —O—P(O)(OH)—O—. These candidates can be evaluated using methods analogous to those described above.

[0615] iii. Acid Cleavable Linking Groups

[0616] In other embodiments, a cleavable linker comprises an acid cleavable linking group. An acid cleavable linking group is a linking group that is cleaved under acidic conditions. In certain embodiments acid cleavable linking groups are cleaved in an acidic environment with a pH of about 6.5 or lower (e.g., about 6.0, 5.5, 5.0, or lower), or by agents such as enzymes that can act as a general acid. In a cell, specific low pH organelles, such as endosomes and lysosomes can provide a cleaving environment for acid cleavable linking groups. Examples of acid cleavable linking groups include but are not limited to hydrazones, esters, and esters of amino acids. Acid cleavable groups can have the general formula —C═NN—, C(O)O, or —OC(O). An exemplary embodiment is when the carbon attached to the oxygen of the ester (the alkoxy group) is an aryl group, substituted alkyl group, or tertiary alkyl group such as dimethyl pentyl or t-butyl. These candidates can be evaluated using methods analogous to those described above.

[0617] iv. Ester-Based Linking Groups

[0618] In other embodiments, a cleavable linker comprises an ester-based cleavable linking group. An ester-based cleavable linking group is cleaved by enzymes such as esterases and amidases in cells. Examples of ester-based cleavable linking groups include, but are not limited to, esters of alkylene, alkenylene and alkynylene groups. Ester cleavable linking groups have the general formula —C(O)O—, or —OC(O)—. These candidates can be evaluated using methods analogous to those described above.

[0619] v. Peptide-Based Cleaving Groups

[0620] In yet other embodiments, a cleavable linker comprises a peptide-based cleavable linking group. A peptide-based cleavable linking group is cleaved by enzymes such as peptidases and proteases in cells. Peptide-based cleavable linking groups are peptide bonds formed between amino acids to yield oligopeptides (e.g., dipeptides, tripeptides etc.) and polypeptides. Peptide-based cleavable groups do not include the amide group (—C(O)NH—). The amide group can be formed between any alkylene, alkenylene or alkynelene. A peptide bond is a special type of amide bond formed between amino acids to yield peptides and proteins. The peptide based cleavage group is generally limited to the peptide bond (i.e., the amide bond) formed between amino acids yielding peptides and proteins and does not include the entire amide functional group. Peptide-based cleavable linking groups have the general formula —NHCHRAC(O)NHCHRBC(O)—, where RA and RB are the R groups of the two adjacent amino acids. These candidates can be evaluated using methods analogous to those described above.

[0621] In some embodiments, an iRNA of the invention is conjugated to a carbohydrate through a linker. Non-limiting examples of iRNA carbohydrate conjugates with linkers of the compositions and methods of the invention include but are not limited to

[chemical structure]

[chemical structure]

[chemical structure]

when one of X or Y is an oligonucleotide, the other is a hydrogen.

[0622] In certain embodiments of the compositions and methods of the invention, a ligand is one or more “GalNAc” (N-acetylgalactosamine) derivatives attached through a bivalent or trivalent branched linker.

[0623] In one embodiment, a dsRNA of the invention is conjugated to a bivalent or trivalent branched linker selected from the group of structures shown in any of formula (XLV)-(XLVIII):

[chemical structure]

wherein:
q2A, q2B, q3A, q3B, q4A, q4B, q5A, q5B and q5C represent independently for each occurrence 0-20 and wherein the repeating unit can be the same or different;
P^{2A}, P^{2B}, P^{3A}, P^{3B}, P^{4A}, P^{4B}, P^{5A}, P^{5B}, P^{5C}, T^{2A}, T^{2B}, T^{3A}, T^{3B}, T^{4A}, T^{4B}, T^{4A}, T^{5B}, T^{5C}, are each independently for each occurrence absent, CO, NH, O, S, OC(O), NHC(O), CH₂, CH₂NH or CH₂O;
Q^{2A}, Q^{2B}, Q^{3A}, Q^{3B}, Q^{4A}, Q^{4B}, Q^{5A}, Q^{5B}, Q^{5C} are independently for each occurrence absent, alkylene, substituted alkylene wherein one or more methylenes can be interrupted or terminated by one or more of O, S, S(O), SO₂, N(R^{N}), C(R′)═C(R″), C—C or C(O);
R^{2A}, R^{2B}, R^{3A}, R^{3B}, R^{4A}, R^{4B}, R^{5A}, R^{5B}, R^{5C} are each independently for each occurrence absent, NH, O, S, CH, C(O)O, C(O)NH, NHCH(R^{a})C(O), —C(O)—CH(R^{a})—NH—, CO, CH═N—O,

[chemical structure]

or heterocyclyl;
L^{2A}, L^{2B}, L^{3A}, L^{3B}, L^{4A}, L^{4B}, L^{5A}, L^{5B} and L⁵C represent the ligand; i.e. each independently for each occurrence a monosaccharide (such as GalNAc), disaccharide, trisaccharide, tetrasaccharide, oligosaccharide, or polysaccharide; and R^{a} is H or amino acid side chain. Trivalent conjugating GalNAc derivatives are particularly useful for use with RNAi agents for inhibiting the expression of a target gene, such as those of formula (XLIX):

[chemical structure]

wherein L^{5A}, L^{5B} and L^{5C} represent a monosaccharide, such as GalNAc derivative.

[0624] Examples of suitable bivalent and trivalent branched linker groups conjugating GalNAc derivatives include, but are not limited to, the structures recited above as formulas II, VII, XI, X, and XIII.

[0625] Representative U.S. patents that teach the preparation of RNA conjugates include, but are not limited to, U.S. Pat. Nos. 4,828,979; 4,948,882; 5,218,105; 5,525,465; 5,541,313; 5,545,730; 5,552,538; 5,578,717, 5,580,731; 5,591,584; 5,109,124; 5,118,802; 5,138,045; 5,414,077; 5,486,603; 5,512,439; 5,578,718; 5,608,046; 4,587,044; 4,605,735; 4,667,025; 4,762,779; 4,789,737; 4,824,941; 4,835,263; 4,876,335; 4,904,582; 4,958,013; 5,082,830; 5,112,963; 5,214,136; 5,082,830; 5,112,963; 5,214,136; 5,245,022; 5,254,469; 5,258,506; 5,262,536; 5,272,250; 5,292,873; 5,317,098; 5,371,241, 5,391,723; 5,416,203, 5,451,463; 5,510,475; 5,512,667; 5,514,785; 5,565,552; 5,567,810; 5,574,142; 5,585,481; 5,587,371; 5,595,726; 5,597,696; 5,599,923; 5,599,928; 5,688,941; 6,294,664; 6,320,017; 6,576,752; 6,783,931; 6,900,297; 7,037,646; and 8,106,022, the entire contents of each of which are hereby incorporated herein by reference.

[0626] It is not necessary for all positions in a given compound to be uniformly modified, and in fact more than one of the aforementioned modifications can be incorporated in a single compound or even at a single nucleoside within an iRNA. The present invention also includes iRNA compounds that are chimeric compounds.

[0627] “Chimeric” iRNA compounds or “chimeras,” in the context of this invention, are iRNA compounds, such as, dsRNAi agents, that contain two or more chemically distinct regions, each made up of at least one monomer unit, i.e., a nucleotide in the case of a dsRNA compound. These iRNAs typically contain at least one region wherein the RNA is modified so as to confer upon the iRNA increased resistance to nuclease degradation, increased cellular uptake, or increased binding affinity for the target nucleic acid. An additional region of the iRNA can serve as a substrate for enzymes capable of cleaving RNA:DNA or RNA:RNA hybrids. By way of example, RNase H is a cellular endonuclease which cleaves the RNA strand of an RNA:DNA duplex. Activation of RNase H, therefore, results in cleavage of the RNA target, thereby greatly enhancing the efficiency of iRNA inhibition of gene expression. Consequently, comparable results can often be obtained with shorter iRNAs when chimeric dsRNAs are used, compared to phosphorothioate deoxy dsRNAs hybridizing to the same target region. Cleavage of the RNA target can be routinely detected by gel electrophoresis and, if necessary, associated nucleic acid hybridization techniques known in the art.

[0628] In certain instances, the RNA of an iRNA can be modified by a non-ligand group. A number of non-ligand molecules have been conjugated to iRNAs in order to enhance the activity, cellular distribution or cellular uptake of the iRNA, and procedures for performing such conjugations are available in the scientific literature. Such non-ligand moieties have included lipid moieties, such as cholesterol (Kubo, T. et al., Biochem. Biophys. Res. Comm., 2007, 365(1):54-61; Letsinger et al., Proc. Natl. Acad. Sci. USA, 1989, 86:6553), cholic acid (Manoharan et al., Bioorg. Med. Chem. Lett., 1994, 4:1053), a thioether, e.g., hexyl-S-tritylthiol (Manoharan et al., Ann. N.Y. Acad. Sci., 1992, 660:306; Manoharan et al., Bioorg. Med. Chem. Let., 1993, 3:2765), a thiocholesterol (Oberhauser et al., Nucl. Acids Res., 1992, 20:533), an aliphatic chain, e.g., dodecandiol or undecyl residues (Saison-Behmoaras et al., EMBO J., 1991, 10:111; Kabanov et al., FEBS Lett., 1990, 259:327; Svinarchuk et al., Biochimie, 1993, 75:49), a phospholipid, e.g., di-hexadecyl-rac-glycerol or triethylammonium 1,2-di-O-hexadecyl-rac-glycero-3-H-phosphonate (Manoharan et al., Tetrahedron Lett., 1995, 36:3651; Shea et al., Nucl. Acids Res., 1990, 18:3777), a polyamine or a polyethylene glycol chain (Manoharan et al., Nucleosides & Nucleotides, 1995, 14:969), or adamantane acetic acid (Manoharan et al., Tetrahedron Lett., 1995, 36:3651), a palmityl moiety (Mishra et al., Biochim. Biophys. Acta, 1995, 1264:229), or an octadecylamine or hexylamino-carbonyl-oxycholesterol moiety (Crooke et al., J. Pharmacol. Exp. Ther., 1996, 277:923). Representative United States patents that teach the preparation of such RNA conjugates have been listed above. Typical conjugation protocols involve the synthesis of RNAs bearing an aminolinker at one or more positions of the sequence. The amino group is then reacted with the molecule being conjugated using appropriate coupling or activating reagents. The conjugation reaction can be performed either with the RNA still bound to the solid support or following cleavage of the RNA, in solution phase. Purification of the RNA conjugate by HPLC typically affords the pure conjugate.

### IV. Delivery of an iRNA of the Invention

[0629] The delivery of an iRNA of the invention to a cell e.g., a cell within a subject, such as a human subject (e.g., a subject in need thereof, such as a subject susceptible to or diagnosed with a TTR-associated disorder, e.g., senile systemic amyloidosis (SSA), systemic familial amyloidosis, familial amyloidotic polyneuropathy (FAP), familial amyloidotic cardiomyopathy (FAC), leptomeningeal/Central Nervous System (CNS) amyloidosis, hyperthyroxinemia, an ocular disease, e.g., Stargardt's disease, diabetic retinopathy, age-related macular degeneration (AMD), e.g., dry AMD and wet AMD; a metabolic disorder, e.g., a disorder of glucose and lipid homeostasis, e.g., insulin resistance associated with type II diabetes, and a cardiovascular disease) can be achieved in a number of different ways. For example, delivery may be performed by contacting a cell with an iRNA of the invention either in vitro or in vivo. In vivo delivery may also be performed directly by administering a composition comprising an iRNA, e.g., a dsRNA, to a subject. Alternatively, in vivo delivery may be performed indirectly by administering one or more vectors that encode and direct the expression of the iRNA. These alternatives are discussed further below.

[0630] In general, any method of delivering a nucleic acid molecule (in vitro or in vivo) can be adapted for use with an iRNA of the invention (see e.g., Akhtar S. and Julian R L. (1992) Trends Cell. Biol. 2(5):139-144 and WO94/02595, which are incorporated herein by reference in their entireties). For in vivo delivery, factors to consider in order to deliver an iRNA molecule include, for example, biological stability of the delivered molecule, prevention of non-specific effects, and accumulation of the delivered molecule in the target tissue. RNA interference has also shown success with local delivery to the CNS by direct injection (Dorn, G., et al. (2004) Nucleic Acids 32:e49; Tan, P H., et al (2005) Gene Ther. 12:59-66; Makimura, H., et al (2002) BMC Neurosci. 3:18; Shishkina, G T., et al (2004) Neuroscience 129:521-528; Thakker, E R., et al (2004) Proc. Natl. Acad. Sci. U.S.A. 101:17270-17275; Akaneya, Y., et al (2005) J. Neurophysiol. 93:594-602). Modification of the RNA or the pharmaceutical carrier can also permit targeting of the iRNA to the target tissue and avoid undesirable off-target effects. iRNA molecules can be modified by chemical conjugation to lipophilic groups such as cholesterol to enhance cellular uptake and prevent degradation. For example, an iRNA directed against ApoB conjugated to a lipophilic cholesterol moiety was injected systemically into mice and resulted in knockdown of apoB mRNA in both the liver and jejunum (Soutschek, J., et al (2004) Nature 432:173-178).

[0631] In an alternative embodiment, the iRNA can be delivered using drug delivery systems such as a nanoparticle, a dendrimer, a polymer, liposomes, or a cationic delivery system. Positively charged cationic delivery systems facilitate binding of an iRNA molecule (negatively charged) and also enhance interactions at the negatively charged cell membrane to permit efficient uptake of an iRNA by the cell. Cationic lipids, dendrimers, or polymers can either be bound to an iRNA, or induced to form a vesicle or micelle (see e.g., Kim S H, et al (2008) Journal of Controlled Release 129(2):107-116) that encases an iRNA. The formation of vesicles or micelles further prevents degradation of the iRNA when administered systemically. Methods for making and administering cationic-iRNA complexes are well within the abilities of one skilled in the art (see e.g., Sorensen, D R, et al (2003) J. Mol. Biol 327:761-766; Verma, U N, et al (2003) Clin. Cancer Res. 9:1291-1300; Arnold, A S et al (2007) J. Hypertens. 25:197-205, which are incorporated herein by reference in their entirety). Some non-limiting examples of drug delivery systems useful for systemic delivery of iRNAs include DOTAP (Sorensen, D R., et al (2003), supra; Verma, U N, et al (2003), supra), “solid nucleic acid lipid particles” (Zimmermann, T S, et al (2006) Nature 441:111-114), cardiolipin (Chien, P Y, et al (2005) Cancer Gene Ther. 12:321-328; Pal, A, et al (2005) Int J. Oncol. 26:1087-1091), polyethyleneimine (Bonnet M E, et al (2008) Pharm. Res. August 16 Epub ahead of print; Aigner, A. (2006) J. Biomed. Biotechnol. 71659), Arg-Gly-Asp (RGD) peptides (Liu, S. (2006) Mol. Pharm. 3:472-487), and polyamidoamines (Tomalia, D A, et al (2007) Biochem. Soc. Trans. 35:61-67; Yoo, H., et al (1999) Pharm. Res. 16:1799-1804). In some embodiments, an iRNA forms a complex with cyclodextrin for systemic administration. Methods for administration and pharmaceutical compositions of iRNAs and cyclodextrins can be found in U.S. Pat. No. 7,427,605, which is herein incorporated by reference in its entirety. Certain aspects of the instant disclosure relate to a method of reducing the expression of an TTR gene in a cell, comprising contacting said cell with the double-stranded RNAi agent of the disclosure. In one embodiment, the cell is a hepatic cell, optionally a hepatocyte. In one embodiment, the cell is an extrahepatic cell.

[0632] A. Vector Encoded iRNAs of the Invention

[0633] iRNA targeting the TTR gene can be expressed from transcription units inserted into DNA or RNA vectors (see, e.g., Couture, A, et al., TIG. (1996), 12:5-10; Skillern, A, et al., International PCT Publication No. WO 00/22113, Conrad, International PCT Publication No. WO 00/22114, and Conrad, U.S. Pat. No. 6,054,299). Expression can be transient (on the order of hours to weeks) or sustained (weeks to months or longer), depending upon the specific construct used and the target tissue or cell type. These transgenes can be introduced as a linear construct, a circular plasmid, or a viral vector, which can be an integrating or non-integrating vector. The transgene can also be constructed to permit it to be inherited as an extrachromosomal plasmid (Gassmann, et al., Proc. Natl. Acad. Sci. USA (1995) 92:1292).

[0634] Viral vector systems which can be utilized with the methods and compositions described herein include, but are not limited to, (a) adenovirus vectors; (b) retrovirus vectors, including but not limited to lentiviral vectors, moloney murine leukemia virus, etc.; (c) adeno-associated virus vectors; (d) herpes simplex virus vectors; (e) SV 40 vectors; (f) polyoma virus vectors; (g) papilloma virus vectors; (h) picornavirus vectors; (i) pox virus vectors such as an orthopox, e.g., vaccinia virus vectors or avipox, e.g. canary pox or fowl pox; and (j) a helper-dependent or gutless adenovirus. Replication-defective viruses can also be advantageous. Different vectors will or will not become incorporated into the cells' genome. The constructs can include viral sequences for transfection, if desired. Alternatively, the construct can be incorporated into vectors capable of episomal replication, e.g. EPV and EBV vectors. Constructs for the recombinant expression of an iRNA will generally require regulatory elements, e.g., promoters, enhancers, etc., to ensure the expression of the iRNA in target cells. Other aspects to consider for vectors and constructs are known in the art.

### V. Pharmaceutical Compositions of the Invention

[0635] The present invention also includes pharmaceutical compositions and formulations which include the iRNAs of the invention. In one embodiment, provided herein are pharmaceutical compositions containing an iRNA, as described herein, and a pharmaceutically acceptable carrier. The pharmaceutical compositions containing the iRNA are useful for preventing or treating an TTR-associated disorder, e.g., senile systemic amyloidosis (SSA), systemic familial amyloidosis, familial amyloidotic polyneuropathy (FAP), familial amyloidotic cardiomyopathy (FAC), leptomeningeal/Central Nervous System (CNS) amyloidosis, and hyperthyroxinemia.

[0636] Such pharmaceutical compositions are formulated based on the mode of delivery. One example is compositions that are formulated for systemic administration via parenteral delivery, e.g., by subcutaneous (SC), intramuscular (IM), or intravenous (IV) delivery. The pharmaceutical compositions of the invention may be administered in dosages sufficient to inhibit expression of an TTR gene.

[0637] In some embodiments, the pharmaceutical compositions of the invention are sterile. In another embodiment, the pharmaceutical compositions of the invention are pyrogen free.

[0638] The pharmaceutical compositions of the invention may be administered in dosages sufficient to inhibit expression of an TTR gene. In general, a suitable dose of an iRNA of the invention will be in the range of about 0.001 to about 200.0 milligrams per kilogram body weight of the recipient per day, generally in the range of about 1 to 50 mg per kilogram body weight per day. Typically, a suitable dose of an iRNA of the invention will be in the range of about 0.1 mg/kg to about 5.0 mg/kg, such as, about 0.3 mg/kg and about 3.0 mg/kg. A repeat-dose regimen may include administration of a therapeutic amount of iRNA on a regular basis, such as every month, once every 3-6 months, or once a year. In certain embodiments, the iRNA is administered about once per month to about once per six months.

[0639] After an initial treatment regimen, the treatments can be administered on a less frequent basis. Duration of treatment can be determined based on the severity of disease.

[0640] In other embodiments, a single dose of the pharmaceutical compositions can be long lasting, such that doses are administered at not more than 1, 2, 3, or 4 month intervals. In some embodiments of the invention, a single dose of the pharmaceutical compositions of the invention is administered about once per month. In other embodiments of the invention, a single dose of the pharmaceutical compositions of the invention is administered quarterly (i.e., about every three months). In other embodiments of the invention, a single dose of the pharmaceutical compositions of the invention is administered twice per year (i.e., about once every six months).

[0641] The skilled artisan will appreciate that certain factors can influence the dosage and timing required to effectively treat a subject, including but not limited to mutations present in the subject, previous treatments, the general health or age of the subject, and other diseases present. Moreover, treatment of a subject with a prophylactically or therapeutically effective amount, as appropriate, of a composition can include a single treatment or a series of treatments.

[0642] The pharmaceutical compositions of the present disclosure can be administered in a number of ways depending upon whether local or systemic treatment is desired and upon the area to be treated. Administration may be topical (including ophthalmic, vaginal, rectal, intranasal, transdermal), oral, or parenteral. Parenteral administration includes intravenous, intraarterial, subcutaneous, intraperitoneal or intramuscular injection or infusion; subdermal, e.g., via an implanted device; or intracranial, e.g., by intraparenchymal, intrathecal or intraventricular, administration.

[0643] The iRNA can be delivered in a manner to target a particular tissue, such as the liver.

[0644] Pharmaceutical compositions and formulations for topical administration can include transdermal patches, ointments, lotions, creams, gels, drops, suppositories, sprays, liquids and powders. Conventional pharmaceutical carriers, aqueous, powder or oily bases, thickeners and the like can be necessary or desirable. Coated condoms, gloves and the like can also be useful. Suitable topical formulations include those in which the RNAi agents featured in the disclosure are in admixture with a topical delivery agent such as lipids, liposomes, fatty acids, fatty acid esters, steroids, chelating agents and surfactants. Suitable lipids and liposomes include neutral (e.g., dioleoylphosphatidyl DOPE ethanolamine, dimyristoylphosphatidyl choline DMPC, distearolyphosphatidyl choline) negative (e.g., dimyristoylphosphatidyl glycerol DMPG) and cationic (e.g., dioleoyltetramethylaminopropyl DOTAP and dioleoylphosphatidyl ethanolamine DOTMA). RNAi agents featured in the disclosure can be encapsulated within liposomes or can form complexes thereto, in particular to cationic liposomes. Alternatively, RNAi agents can be complexed to lipids, in particular to cationic lipids. Suitable fatty acids and esters include but are not limited to arachidonic acid, oleic acid, eicosanoic acid, lauric acid, caprylic acid, capric acid, myristic acid, palmitic acid, stearic acid, linoleic acid, linolenic acid, dicaprate, tricaprate, monoolein, dilaurin, glyceryl 1-monocaprate, 1-dodecylazacycloheptan-2-one, an acylcarnitine, an acylcholine, or a C1-20 alkyl ester (e.g., isopropylmyristate IPM), monoglyceride, diglyceride or pharmaceutically acceptable salt thereof. Topical formulations are described in detail in U.S. Pat. No. 6,747,014, which is incorporated herein by reference.

[0645] In one embodiment, the siRNAs, double stranded RNA agents of the invention, are administered to a cell in a pharmaceutical composition by a topical route of administration.

[0646] In one embodiment, the pharmaceutical composition may include an siRNA compound mixed with a topical delivery agent. The topical delivery agent can be a plurality of microscopic vesicles. The microscopic vesicles can be liposomes. In some embodiments the liposomes are cationic liposomes.

[0647] In another embodiment, the dsRNA agent is admixed with a topical penetration enhancer. In one embodiment, the topical penetration enhancer is a fatty acid. The fatty acid can be arachidonic acid, oleic acid, lauric acid, caprylic acid, capric acid, myristic acid, palmitic acid, stearic acid, linoleic acid, linolenic acid, dicaprate, tricaprate, monolein, dilaurin, glyceryl 1-monocaprate, 1-dodecylazacycloheptan-2-one, an acylcarnitine, an acylcholine, or a C1-10 alkyl ester, monoglyceride, diglyceride or pharmaceutically acceptable salt thereof.

[0648] In another embodiment, the topical penetration enhancer is a bile salt. The bile salt can be cholic acid, dehydrocholic acid, deoxycholic acid, glucholic acid, glycholic acid, glycodeoxycholic acid, taurocholic acid, taurodeoxycholic acid, chenodeoxycholic acid, ursodeoxycholic acid, sodium tauro-24,25-dihydro-fusidate, sodium glycodihydrofusidate, polyoxyethylene-9-lauryl ether or a pharmaceutically acceptable salt thereof.

[0649] In another embodiment, the penetration enhancer is a chelating agent. The chelating agent can be EDTA, citric acid, a salicyclate, a N-acyl derivative of collagen, laureth-9, an N-amino acyl derivative of a beta-diketone or a mixture thereof.

[0650] In another embodiment, the penetration enhancer is a surfactant, e.g., an ionic or nonionic surfactant. The surfactant can be sodium lauryl sulfate, polyoxyethylene-9-lauryl ether, polyoxyethylene-20-cetyl ether, a perfluorchemical emulsion or mixture thereof.

[0651] In another embodiment, the penetration enhancer can be selected from a group consisting of unsaturated cyclic ureas, 1-alkyl-alkones, 1-alkenylazacyclo-alakanones, steroidal anti-inflammatory agents and mixtures thereof. In yet another embodiment the penetration enhancer can be a glycol, a pyrrol, an azone, or a terpenes.

[0652] In one aspect, the invention features a pharmaceutical composition including an siRNA compound, e.g., a double-stranded siRNA compound, or ssiRNA compound, (e.g., a precursor, e.g., a larger siRNA compound which can be processed into a ssiRNA compound, or a DNA which encodes an siRNA compound, e.g., a double-stranded siRNA compound, or ssiRNA compound, or precursor thereof) in an injectable dosage form. In one embodiment, the injectable dosage form of the pharmaceutical composition includes sterile aqueous solutions or dispersions and sterile powders. In some embodiments the sterile solution can include a diluent such as water; saline solution; fixed oils, polyethylene glycols, glycerin, or propylene glycol.

[0653] The iRNA molecules of the invention can be incorporated into pharmaceutical compositions. Such compositions typically include one or more species of iRNA and a pharmaceutically acceptable carrier. As used herein the language “pharmaceutically acceptable carrier” is intended to include any and all solvents, dispersion media, coatings, antibacterial and antifungal agents, isotonic and absorption delaying agents, and the like, compatible with pharmaceutical administration to a cell, e.g., a liver cell. The use of such media and agents for pharmaceutically active substances is well known in the art. Except insofar as any conventional media or agent is incompatible with the active compound, use thereof in the compositions is contemplated. Supplementary active compounds can also be incorporated into the compositions.

[0654] Pharmaceutical compositions of the present invention include, but are not limited to, solutions, emulsions, and liposome-containing formulations. These compositions can be generated from a variety of components that include, but are not limited to, preformed liquids, self-emulsifying solids, and self-emulsifying semisolids. Formulations include those that target the liver.

[0655] The pharmaceutical formulations of the present invention, which can conveniently be presented in unit dosage form, can be prepared according to conventional techniques well known in the pharmaceutical industry. Such techniques include the step of bringing into association the active ingredients with the pharmaceutical carrier(s) or excipient(s). In general, the formulations are prepared by uniformly and intimately bringing into association the active ingredients with liquid carriers.

[0656] A. Additional Formulations

[0657] i. Emulsions

[0658] The compositions of the present invention can be prepared and formulated as emulsions. Emulsions are typically heterogeneous systems of one liquid dispersed in another in the form of droplets usually exceeding 0.1 μm in diameter (see e.g., Ansel's Pharmaceutical Dosage Forms and Drug Delivery Systems, Allen, L V., Popovich N G., and Ansel H C., 2004, Lippincott Williams & Wilkins (8th ed.), New York, N.Y.; Idson, in Pharmaceutical Dosage Forms, Lieberman, Rieger and Banker (Eds.), 1988, Marcel Dekker, Inc., New York, N.Y., volume 1, p. 199; Rosoff, in Pharmaceutical Dosage Forms, Lieberman, Rieger and Banker (Eds.), 1988, Marcel Dekker, Inc., New York, N.Y., Volume 1, p. 245; Block in Pharmaceutical Dosage Forms, Lieberman, Rieger and Banker (Eds.), 1988, Marcel Dekker, Inc., New York, N.Y., volume 2, p. 335; Higuchi et al., in Remington's Pharmaceutical Sciences, Mack Publishing Co., Easton, Pa., 1985, p. 301). Emulsions are often biphasic systems comprising two immiscible liquid phases intimately mixed and dispersed with each other. In general, emulsions can be of either the water-in-oil (w/o) or the oil-in-water (o/w) variety. When an aqueous phase is finely divided into and dispersed as minute droplets into a bulk oily phase, the resulting composition is called a water-in-oil (w/o) emulsion. Alternatively, when an oily phase is finely divided into and dispersed as minute droplets into a bulk aqueous phase, the resulting composition is called an oil-in-water (o/w) emulsion. Emulsions can contain additional components in addition to the dispersed phases, and the active drug which can be present as a solution either in the aqueous phase, oily phase or itself as a separate phase. Pharmaceutical excipients such as emulsifiers, stabilizers, dyes, and anti-oxidants can also be present in emulsions as needed. Pharmaceutical emulsions can also be multiple emulsions that are comprised of more than two phases such as, for example, in the case of oil-in-water-in-oil (o/w/o) and water-in-oil-in-water (w/o/w) emulsions. Such complex formulations often provide certain advantages that simple binary emulsions do not. Multiple emulsions in which individual oil droplets of an o/w emulsion enclose small water droplets constitute a w/o/w emulsion. Likewise a system of oil droplets enclosed in globules of water stabilized in an oily continuous phase provides an o/w/o emulsion.

[0659] Emulsions are characterized by little or no thermodynamic stability. Often, the dispersed or discontinuous phase of the emulsion is well dispersed into the external or continuous phase and maintained in this form through the means of emulsifiers or the viscosity of the formulation. Other means of stabilizing emulsions entail the use of emulsifiers that can be incorporated into either phase of the emulsion. Emulsifiers can broadly be classified into four categories: synthetic surfactants, naturally occurring emulsifiers, absorption bases, and finely dispersed solids (see e.g., Ansel's Pharmaceutical Dosage Forms and Drug Delivery Systems, Allen, L V., Popovich N G., and Ansel H C., 2004, Lippincott Williams & Wilkins (8th ed.), New York, N.Y.; Idson, in Pharmaceutical Dosage Forms, Lieberman, Rieger and Banker (Eds.), 1988, Marcel Dekker, Inc., New York, N.Y., volume 1, p. 199).

[0660] Synthetic surfactants, also known as surface active agents, have found wide applicability in the formulation of emulsions and have been reviewed in the literature (see e.g., Ansel's Pharmaceutical Dosage Forms and Drug Delivery Systems, Allen, L V., Popovich N G., and Ansel H C., 2004, Lippincott Williams & Wilkins (8th ed.), New York, N.Y.; Rieger, in Pharmaceutical Dosage Forms, Lieberman, Rieger and Banker (Eds.), 1988, Marcel Dekker, Inc., New York, N.Y., volume 1, p. 285; Idson, in Pharmaceutical Dosage Forms, Lieberman, Rieger and Banker (Eds.), Marcel Dekker, Inc., New York, N.Y., 1988, volume 1, p. 199). Surfactants are typically amphiphilic and comprise a hydrophilic and a hydrophobic portion. The ratio of the hydrophilic to the hydrophobic nature of the surfactant has been termed the hydrophile/lipophile balance (HLB) and is a valuable tool in categorizing and selecting surfactants in the preparation of formulations. Surfactants can be classified into different classes based on the nature of the hydrophilic group: nonionic, anionic, cationic, and amphoteric (see e.g., Ansel's Pharmaceutical Dosage Forms and Drug Delivery Systems, Allen, L V., Popovich N G., and Ansel H C., 2004, Lippincott Williams & Wilkins (8th ed.), New York, N.Y. Rieger, in Pharmaceutical Dosage Forms, Lieberman, Rieger and Banker (Eds.), 1988, Marcel Dekker, Inc., New York, N.Y., volume 1, p. 285).

[0661] A large variety of non-emulsifying materials are also included in emulsion formulations and contribute to the properties of emulsions. These include fats, oils, waxes, fatty acids, fatty alcohols, fatty esters, humectants, hydrophilic colloids, preservatives, and antioxidants (Block, in Pharmaceutical Dosage Forms, Lieberman, Rieger and Banker (Eds.), 1988, Marcel Dekker, Inc., New York, N.Y., volume 1, p. 335; Idson, in Pharmaceutical Dosage Forms, Lieberman, Rieger and Banker (Eds.), 1988, Marcel Dekker, Inc., New York, N.Y., volume 1, p. 199).

[0662] The application of emulsion formulations via dermatological, oral, and parenteral routes, and methods for their manufacture have been reviewed in the literature (see e.g., Ansel's Pharmaceutical Dosage Forms and Drug Delivery Systems, Allen, L V., Popovich N G., and Ansel H C., 2004, Lippincott Williams & Wilkins (8th ed.), New York, N.Y.; Idson, in Pharmaceutical Dosage Forms, Lieberman, Rieger and Banker (Eds.), 1988, Marcel Dekker, Inc., New York, N.Y., volume 1, p. 199).

[0663] ii. Microemulsions

[0664] In one embodiment of the present invention, the compositions of iRNAs and nucleic acids are formulated as microemulsions. A microemulsion can be defined as a system of water, oil, and amphiphile which is a single optically isotropic and thermodynamically stable liquid solution (see e.g., Ansel's Pharmaceutical Dosage Forms and Drug Delivery Systems, Allen, L V., Popovich N G., and Ansel H C., 2004, Lippincott Williams & Wilkins (8th ed.), New York, N.Y.; Rosoff, in Pharmaceutical Dosage Forms, Lieberman, Rieger and Banker (Eds.), 1988, Marcel Dekker, Inc., New York, N.Y., volume 1, p. 245). Typically microemulsions are systems that are prepared by first dispersing an oil in an aqueous surfactant solution and then adding a sufficient amount of a fourth component, generally an intermediate chain-length alcohol to form a transparent system. Therefore, microemulsions have also been described as thermodynamically stable, isotropically clear dispersions of two immiscible liquids that are stabilized by interfacial films of surface-active molecules (Leung and Shah, in: Controlled Release of Drugs: Polymers and Aggregate Systems, Rosoff, M., Ed., 1989, VCH Publishers, New York, pages 185-215).

[0665] iii. Microparticles

[0666] An iRNA of the invention may be incorporated into a particle, e.g., a microparticle. Microparticles can be produced by spray-drying, but may also be produced by other methods including lyophilization, evaporation, fluid bed drying, vacuum drying, or a combination of these techniques.

[0667] iv. Penetration Enhancers

[0668] In one embodiment, the present invention employs various penetration enhancers to effect the efficient delivery of nucleic acids, particularly iRNAs, to the skin of animals. Most drugs are present in solution in both ionized and nonionized forms. However, usually only lipid soluble or lipophilic drugs readily cross cell membranes. It has been discovered that even non-lipophilic drugs can cross cell membranes if the membrane to be crossed is treated with a penetration enhancer. In addition to aiding the diffusion of non-lipophilic drugs across cell membranes, penetration enhancers also enhance the permeability of lipophilic drugs.

[0669] Penetration enhancers can be classified as belonging to one of five broad categories, i.e., surfactants, fatty acids, bile salts, chelating agents, and non-chelating non-surfactants (see e.g., Malmsten, M. Surfactants and polymers in drug delivery, Informa Health Care, New York, N.Y., 2002; Lee et al., Critical Reviews in Therapeutic Drug Carrier Systems, 1991, p. 92). Each of the above mentioned classes of penetration enhancers and their use in manufacture of pharmaceutical compositions and delivery of pharmaceutical agents are well known in the art.

[0670] v. Excipients

[0671] In contrast to a carrier compound, a “pharmaceutical carrier” or “excipient” is a pharmaceutically acceptable solvent, suspending agent, or any other pharmacologically inert vehicle for delivering one or more nucleic acids to an animal. The excipient can be liquid or solid and is selected, with the planned manner of administration in mind, so as to provide for the desired bulk, consistency, etc., when combined with a nucleic acid and the other components of a given pharmaceutical composition. Such agent are well known in the art.

[0672] vi. Other Components

[0673] The compositions of the present invention can additionally contain other adjunct components conventionally found in pharmaceutical compositions, at their art-established usage levels. Thus, for example, the compositions can contain additional, compatible, pharmaceutically-active materials such as, for example, antipruritics, astringents, local anesthetics or anti-inflammatory agents, or can contain additional materials useful in physically formulating various dosage forms of the compositions of the present invention, such as dyes, flavoring agents, preservatives, antioxidants, opacifiers, thickening agents and stabilizers. However, such materials, when added, should not unduly interfere with the biological activities of the components of the compositions of the present invention. The formulations can be sterilized and, if desired, mixed with auxiliary agents, e.g., lubricants, preservatives, stabilizers, wetting agents, emulsifiers, salts for influencing osmotic pressure, buffers, colorings, flavorings, or aromatic substances, and the like which do not deleteriously interact with the nucleic acid(s) of the formulation.

[0674] Aqueous suspensions can contain substances which increase the viscosity of the suspension including, for example, sodium carboxymethylcellulose, sorbitol, or dextran. The suspension can also contain stabilizers.

[0675] In some embodiments, pharmaceutical compositions featured in the invention include (a) one or more iRNA and (b) one or more agents which function by a non-iRNA mechanism and which are useful in treating an TTR-associated disorder, e.g., senile systemic amyloidosis (SSA), systemic familial amyloidosis, familial amyloidotic polyneuropathy (FAP), familial amyloidotic cardiomyopathy (FAC), leptomeningeal/Central Nervous System (CNS) amyloidosis, hyperthyroxinemia, an ocular disease, e.g., Stargardt's disease, diabetic retinopathy, age-related macular degeneration (AMD), e.g., dry AMD and wet AMD; a metabolic disorder, e.g., a disorder of glucose and lipid homeostasis, e.g., insulin resistance associated with type II diabetes, and a cardiovascular disease.

[0676] Toxicity and prophylactic efficacy of such compounds can be determined by standard pharmaceutical procedures in cell cultures or experimental animals, e.g., for determining the LD50 (the dose lethal to 50% of the population) and the ED50 (the dose prophylactically effective in 50% of the population). The dose ratio between toxic and therapeutic effects is the therapeutic index and it can be expressed as the ratio LD50/ED50. Compounds that exhibit high therapeutic indices are preferred.

[0677] The data obtained from cell culture assays and animal studies can be used in formulating a range of dosage for use in humans. The dosage of compositions featured herein in the invention lies generally within a range of circulating concentrations that include the ED50, such as, an ED80 or ED90, with little or no toxicity. The dosage can vary within this range depending upon the dosage form employed and the route of administration utilized. For any compound used in the methods featured in the invention, the prophylactically effective dose can be estimated initially from cell culture assays. A dose can be formulated in animal models to achieve a circulating plasma concentration range of the compound or, when appropriate, of the polypeptide product of a target sequence (e.g., achieving a decreased concentration of the polypeptide) that includes the IC50 (i.e., the concentration of the test compound which achieves a half-maximal inhibition of symptoms) or higher levels of inhibition as determined in cell culture. Such information can be used to more accurately determine useful doses in humans. Levels in plasma can be measured, for example, by high performance liquid chromatography.

[0678] In addition to their administration, as discussed above, the iRNAs featured in the invention can be administered in combination with other known agents used for the prevention or treatment of an TTR-associated disorder, e.g., senile systemic amyloidosis (SSA), systemic familial amyloidosis, familial amyloidotic polyneuropathy (FAP), familial amyloidotic cardiomyopathy (FAC), leptomeningeal/Central Nervous System (CNS) amyloidosis, and hyperthyroxinemia. In any event, the administering physician can adjust the amount and timing of iRNA administration on the basis of results observed using standard measures of efficacy known in the art or described herein.

### VI. Methods for Inhibiting TTR Expression

[0679] The present invention also provides methods of inhibiting expression of an TTR gene in a cell. The methods include contacting a cell with an RNAi agent, e.g., double stranded RNA agent, in an amount effective to inhibit expression of TTR in the cell, thereby inhibiting expression of TTR in the cell. In some embodiments of the disclosure, expression of an TTR gene is inhibited preferentially in the liver (e.g., hepatocytes).

[0680] Contacting of a cell with an iRNA, e.g., a double stranded RNA agent, may be done in vitro or in vivo. Contacting a cell in vivo with the iRNA includes contacting a cell or group of cells within a subject, e.g., a human subject, with the iRNA. Combinations of in vitro and in vivo methods of contacting a cell are also possible. Contacting a cell may be direct or indirect, as discussed above. Furthermore, contacting a cell may be accomplished via a targeting ligand, including any ligand described herein or known in the art. In some embodiments, the targeting ligand is a carbohydrate moiety, e.g., a GalNAc₃ ligand, or any other ligand that directs the RNAi agent to a site of interest.

[0681] The term “inhibiting,” as used herein, is used interchangeably with “reducing,” “silencing,” “downregulating”, “suppressing”, and other similar terms, and includes any level of inhibition.

[0682] The phrase “inhibiting expression of an TTR” is intended to refer to inhibition of expression of any TTR gene (such as, e.g., a mouse TTR gene, a rat TTR gene, a monkey TTR gene, or a human TTR gene) as well as variants or mutants of an TTR gene. Thus, the TTR gene may be a wild-type TTR gene, a mutant TTR gene, or a transgenic TTR gene in the context of a genetically manipulated cell, group of cells, or organism.

[0683] “Inhibiting expression of an TTR gene” includes any level of inhibition of an TTR gene, e.g., at least partial suppression of the expression of an TTR gene. The expression of the TTR gene may be assessed based on the level, or the change in the level, of any variable associated with TTR gene expression, e.g., TTR mRNA level or TTR protein level. This level may be assessed in an individual cell or in a group of cells, including, for example, a sample derived from a subject.

[0684] Inhibition may be assessed by a decrease in an absolute or relative level of one or more variables that are associated with TTR expression compared with a control level. The control level may be any type of control level that is utilized in the art, e.g., a pre-dose baseline level, or a level determined from a similar subject, cell, or sample that is untreated or treated with a control (such as, e.g., buffer only control or inactive agent control).

[0685] In some embodiments of the methods of the invention, expression of an TTR gene is inhibited by at least 50%, 55%, 60%, 65%, 70%, 75%, 80%, 85%, 90%, or 95%, or to below the level of detection of the assay. In some embodiments, expression of an TTR gene is inhibited by at least 70%. It is further understood that inhibition of TTR expression in certain tissues, e.g., in liver, without a significant inhibition of expression in other tissues, e.g., brain, may be desirable. In some embodiments, expression level is determined using the assay method provided in Example 2 with a 10 nM siRNA concentration in the appropriate species matched cell line.

[0686] In certain embodiments, inhibition of expression in vivo is determined by knockdown of the human gene in a rodent expressing the human gene, e.g., an AAV-infected mouse expressing the human target gene (i.e., TTR), e.g., when administered as a single dose, e.g., at 3 mg/kg at the nadir of RNA expression. Knockdown of expression of an endogenous gene in a model animal system can also be determined, e.g., after administration of a single dose at, e.g., 3 mg/kg at the nadir of RNA expression. Such systems are useful when the nucleic acid sequence of the human gene and the model animal gene are sufficiently close such that the human iRNA provides effective knockdown of the model animal gene. RNA expression in liver is determined using the PCR methods provided in Example 2.

[0687] Inhibition of the expression of an TTR gene may be manifested by a reduction of the amount of mRNA expressed by a first cell or group of cells (such cells may be present, for example, in a sample derived from a subject) in which an TTR gene is transcribed and which has or have been treated (e.g., by contacting the cell or cells with an iRNA of the invention, or by administering an iRNA of the invention to a subject in which the cells are or were present) such that the expression of an TTR gene is inhibited, as compared to a second cell or group of cells substantially identical to the first cell or group of cells but which has not or have not been so treated (control cell(s) not treated with an iRNA or not treated with an iRNA targeted to the gene of interest). In some embodiments, the inhibition is assessed by the method provided in Example 2 using a 10 nM siRNA concentration in the species matched cell line and expressing the level of mRNA in treated cells as a percentage of the level of mRNA in control cells, using the following formula:

$$\frac{( mRNA in control cells ) - ( mRNA in treated cells )}{( mRNA in control cells )} •100 \%$$

[0688] In other embodiments, inhibition of the expression of an TTR gene may be assessed in terms of a reduction of a parameter that is functionally linked to TTR gene expression, e.g., TTR protein level in blood or serum from a subject. TTR gene silencing may be determined in any cell expressing TTR, either endogenous or heterologous from an expression construct, and by any assay known in the art.

[0689] Inhibition of the expression of an TTR protein may be manifested by a reduction in the level of the TTR protein that is expressed by a cell or group of cells or in a subject sample (e.g., the level of protein in a blood sample derived from a subject). As explained above, for the assessment of mRNA suppression, the inhibition of protein expression levels in a treated cell or group of cells may similarly be expressed as a percentage of the level of protein in a control cell or group of cells, or the change in the level of protein in a subject sample, e.g., blood or serum derived therefrom.

[0690] A control cell, a group of cells, or subject sample that may be used to assess the inhibition of the expression of an TTR gene includes a cell, group of cells, or subject sample that has not yet been contacted with an RNAi agent of the invention. For example, the control cell, group of cells, or subject sample may be derived from an individual subject (e.g., a human or animal subject) prior to treatment of the subject with an RNAi agent or an appropriately matched population control.

[0691] The level of TTR mRNA that is expressed by a cell or group of cells may be determined using any method known in the art for assessing mRNA expression. In one embodiment, the level of expression of TTR in a sample is determined by detecting a transcribed polynucleotide, or portion thereof, e.g., mRNA of the TTR gene. RNA may be extracted from cells using RNA extraction techniques including, for example, using acid phenol/guanidine isothiocyanate extraction (RNAzol B; Biogenesis), RNeasy™ RNA preparation kits (Qiagen®) or PAXgene™ (PreAnalytix™, Switzerland). Typical assay formats utilizing ribonucleic acid hybridization include nuclear run-on assays, RT-PCR, RNase protection assays, northern blotting, in situ hybridization, and microarray analysis.

[0692] In some embodiments, the level of expression of TTR is determined using a nucleic acid probe. The term “probe”, as used herein, refers to any molecule that is capable of selectively binding to a specific TTR. Probes can be synthesized by one of skill in the art, or derived from appropriate biological preparations. Probes may be specifically designed to be labeled. Examples of molecules that can be utilized as probes include, but are not limited to, RNA, DNA, proteins, antibodies, and organic molecules.

[0693] Isolated mRNA can be used in hybridization or amplification assays that include, but are not limited to, Southern or northern analyses, polymerase chain reaction (PCR) analyses and probe arrays. One method for the determination of mRNA levels involves contacting the isolated mRNA with a nucleic acid molecule (probe) that can hybridize to TTR mRNA. In one embodiment, the mRNA is immobilized on a solid surface and contacted with a probe, for example by running the isolated mRNA on an agarose gel and transferring the mRNA from the gel to a membrane, such as nitrocellulose. In an alternative embodiment, the probe(s) are immobilized on a solid surface and the mRNA is contacted with the probe(s), for example, in an Affymetrix® gene chip array. A skilled artisan can readily adapt known mRNA detection methods for use in determining the level of TTR mRNA.

[0694] An alternative method for determining the level of expression of TTR in a sample involves the process of nucleic acid amplification or reverse transcriptase (to prepare cDNA) of for example mRNA in the sample, e.g., by RT-PCR (the experimental embodiment set forth in Mullis, 1987, U.S. Pat. No. 4,683,202), ligase chain reaction (Barany (1991) Proc. Natl. Acad. Sci. USA 88:189-193), self sustained sequence replication (Guatelli et al. (1990) Proc. Natl. Acad. Sci. USA 87:1874-1878), transcriptional amplification system (Kwoh et al. (1989) Proc. Natl. Acad. Sci. USA 86:1173-1177), Q-Beta Replicase (Lizardi et al. (1988) Bio/Technology 6:1197), rolling circle replication (Lizardi et al., U.S. Pat. No. 5,854,033) or any other nucleic acid amplification method, followed by the detection of the amplified molecules using techniques well known to those of skill in the art. These detection schemes are especially useful for the detection of nucleic acid molecules if such molecules are present in very low numbers. In particular aspects of the invention, the level of expression of TTR is determined by quantitative fluorogenic RT-PCR (i.e., the TaqMan™ System). In some embodiments, expression level is determined by the method provided in Example 2 using, e.g., a 10 nM siRNA concentration, in the species matched cell line.

[0695] The expression levels of TTR mRNA may be monitored using a membrane blot (such as used in hybridization analysis such as northern, Southern, dot, and the like), or microwells, sample tubes, gels, beads or fibers (or any solid support comprising bound nucleic acids). See U.S. Pat. Nos. 5,770,722, 5,874,219, 5,744,305, 5,677,195 and 5,445,934, which are incorporated herein by reference. The determination of TTR expression level may also comprise using nucleic acid probes in solution.

[0696] In some embodiments, the level of mRNA expression is assessed using branched DNA (bDNA) assays or real time PCR (qPCR). The use of these methods is described and exemplified in the Examples presented herein. In some embodiments, expression level is determined by the method provided in Example 2 using a 10 nM siRNA concentration in the species matched cell line.

[0697] The level of TTR protein expression may be determined using any method known in the art for the measurement of protein levels. Such methods include, for example, electrophoresis, capillary electrophoresis, high performance liquid chromatography (HPLC), thin layer chromatography (TLC), hyperdiffusion chromatography, fluid or gel precipitin reactions, absorption spectroscopy, a colorimetric assays, spectrophotometric assays, flow cytometry, immunodiffusion (single or double), immunoelectrophoresis, western blotting, radioimmunoassay (RIA), enzyme-linked immunosorbent assays (ELISAs), immunofluorescent assays, electrochemiluminescence assays, and the like.

[0698] In some embodiments, the efficacy of the methods of the invention are assessed by a decrease in TTR mRNA or protein level (e.g., in a liver biopsy).

[0699] In some embodiments, the efficacy of the methods of the invention can be monitored by detecting or monitoring a reduction in a symptom of an TTR-associate disorder, e.g., reduction in sensory neuropathy (e.g., paresthesia, hypesthesia in distal limbs), autonomic neuropathy (e.g., gastrointestinal dysfunction, such as gastric ulcer, or orthostatic hypotension), motor neuropathy, seizures, dementia, myelopathy, polyneuropathy, carpal tunnel syndrome, autonomic insufficiency, cardiomyopathy, vitreous opacities, renal insufficiency, nephropathy, substantially reduced mBMI (modified Body Mass Index), cranial nerve dysfunction, and corneal lattice dystrophy. It is well within the ability of one skilled in the art to monitor efficacy of the methods by measuring any one of such parameters, or any combination of parameters.

[0700] In some embodiments of the methods of the invention, the iRNA is administered to a subject such that the iRNA is delivered to a specific site within the subject. The inhibition of expression of TTR may be assessed using measurements of the level or change in the level of TTR mRNA or TTR protein in a sample derived from fluid or tissue from the specific site within the subject (e.g., liver or blood).

[0701] As used herein, the terms detecting or determining a level of an analyte are understood to mean performing the steps to determine if a material, e.g., protein, RNA, is present. As used herein, methods of detecting or determining include detection or determination of an analyte level that is below the level of detection for the method used.

### VII. Prophylactic and Treatment Methods of the Invention

[0702] The present invention also provides methods of using an iRNA of the invention or a composition containing an iRNA of the invention to inhibit expression of TTR, thereby preventing or treating an TTR-associated disorder, e.g., senile systemic amyloidosis (SSA), systemic familial amyloidosis, familial amyloidotic polyneuropathy (FAP), familial amyloidotic cardiomyopathy (FAC), leptomeningeal/Central Nervous System (CNS) amyloidosis, hyperthyroxinemia, an ocular disease, e.g., Stargardt's disease, diabetic retinopathy, age-related macular degeneration (AMD), e.g., dry AMD and wet AMD; a metabolic disorder, e.g., a disorder of glucose and lipid homeostasis, e.g., insulin resistance associated with type II diabetes, and a cardiovascular disease. In the methods of the invention the cell may be contacted with the siRNA in vitro or in vivo, i.e., the cell may be within a subject.

[0703] A cell suitable for treatment using the methods of the invention may be any cell that expresses an TTR gene, e.g., a liver cell. A cell suitable for use in the methods of the invention may be a mammalian cell, e.g., a primate cell (such as a human cell, including human cell in a chimeric non-human animal, or a non-human primate cell, e.g., a monkey cell or a chimpanzee cell), or a non-primate cell. In certain embodiments, the cell is a human cell, e.g., a human liver cell. In the methods of the invention, TTR expression is inhibited in the cell by at least 50, 55, 60, 65, 70, 75, 80, 85, 90, or 95, or to a level below the level of detection of the assay.

[0704] The in vivo methods of the invention may include administering to a subject a composition containing an iRNA, where the iRNA includes a nucleotide sequence that is complementary to at least a part of an RNA transcript of the TTR gene of the mammal to which the RNAi agent is to be administered. The composition can be administered by any means known in the art including, but not limited to oral, intraperitoneal, or parenteral routes, including intracranial (e.g., intraventricular, intraparenchymal, and intrathecal), intravenous, intramuscular, subcutaneous, transdermal, airway (aerosol), nasal, rectal, intraocular (e.g., periocular, conjunctival, subtenon, intracameral, intravitreal, intraocular, anterior or posterior juxtascleral, subretinal, subconjunctival, retrobulbar, or intracanalicular injection), intravenous, intramuscular, subcutaneous, transdermal, airway (aerosol), and topical (including buccal and sublingual) administration.

[0705] In certain embodiments, the compositions are administered by intravenous infusion or injection. In certain embodiments, the compositions are administered by subcutaneous injection. In certain embodiments, the compositions are administered by intramuscular injection.

[0706] The mode of administration may be chosen based upon whether local or systemic treatment is desired and based upon the area to be treated. The route and site of administration may be chosen to enhance targeting.

[0707] In one aspect, the present invention also provides methods for inhibiting the expression of an TTR gene in a mammal. The methods include administering to the mammal a composition comprising a dsRNA that targets an TTR gene in a cell of the mammal and maintaining the mammal for a time sufficient to obtain degradation of the mRNA transcript of the TTR gene, thereby inhibiting expression of the TTR gene in the cell. Reduction in gene expression can be assessed by any methods known in the art and by methods, e.g. qRT-PCR, described herein, e.g., in Example 2. Reduction in protein production can be assessed by any methods known it the art, e.g. ELISA. In certain embodiments, a puncture liver biopsy sample serves as the tissue material for monitoring the reduction in the TTR gene or protein expression. In other embodiments, a blood sample serves as the subject sample for monitoring the reduction in the TTR protein expression.

[0708] The present invention further provides methods of treatment in a subject in need thereof, e.g., a subject diagnosed with an TTR-associated disorder, such as senile systemic amyloidosis (SSA), systemic familial amyloidosis, familial amyloidotic polyneuropathy (FAP), familial amyloidotic cardiomyopathy (FAC), leptomeningeal/Central Nervous System (CNS) amyloidosis, hyperthyroxinemia, an ocular disease, e.g., Stargardt's disease, diabetic retinopathy, age-related macular degeneration (AMD), e.g., dry AMD and wet AMD; a metabolic disorder, e.g., a disorder of glucose and lipid homeostasis, e.g., insulin resistance associated with type II diabetes, and a cardiovascular disease.

[0709] The present invention further provides methods of prophylaxis in a subject in need thereof. The treatment methods of the invention include administering an iRNA of the invention to a subject, e.g., a subject that would benefit from a reduction of TTR expression, in a prophylactically effective amount of a dsRNA targeting an TTR gene or a pharmaceutical composition comprising a dsRNA targeting an TTR gene.

[0710] In one aspect, the present invention provides methods of treating a subject having a disorder that would benefit from reduction in TTR expression, e.g., an TTR-associated disorder, such as senile systemic amyloidosis (SSA), systemic familial amyloidosis, familial amyloidotic polyneuropathy (FAP), familial amyloidotic cardiomyopathy (FAC), leptomeningeal/Central Nervous System (CNS) amyloidosis, hyperthyroxinemia, an ocular disease, e.g., Stargardt's disease, diabetic retinopathy, age-related macular degeneration (AMD), e.g., dry AMD and wet AMD; a metabolic disorder, e.g., a disorder of glucose and lipid homeostasis, e.g., insulin resistance associated with type II diabetes, and a cardiovascular disease.

[0711] Treatment of a subject that would benefit from a reduction and/or inhibition of TTR gene expression includes therapeutic treatment (e.g., a subject is having an TTR-associated disorder) and prophylactic treatment (e.g., the subject is not having an TTR-associated disorder or a subject may be at risk of developing an TTR-associated disorder).

[0712] In some embodiments, the TTR-associated disorder is selected from the group consisting of senile systemic amyloidosis (SSA), systemic familial amyloidosis, familial amyloidotic polyneuropathy (FAP), familial amyloidotic cardiomyopathy (FAC), leptomeningeal/Central Nervous System (CNS) amyloidosis, hyperthyroxinemia, an ocular disease, e.g., Stargardt's disease, diabetic retinopathy, age-related macular degeneration (AMD), e.g., dry AMD and wet AMD; a metabolic disorder, e.g., a disorder of glucose and lipid homeostasis, e.g., insulin resistance associated with type II diabetes, and a cardiovascular disease.

[0713] In one embodiment, the subject is suffering from familial amyloidotic cardiomyopathy (FAC). In another embodiment, the subject is suffering from FAC with a mixed phenotype, i.e., a subject having both cardiac and neurological impairments. In yet another embodiment, the subject is suffering from FAP with a mixed phenotype, i.e., a subject having both neurological and cardiac impairments. In one embodiment, the subject is suffering from FAP that has been treated with an orthotopic liver transplantation (OLT).

[0714] In another embodiment, the subject is suffering from senile systemic amyloidosis (SSA). In other embodiments of the methods of the invention, the subject is suffering from familial amyloidotic cardiomyopathy (FAC) and senile systemic amyloidosis (SSA). Normal-sequence TTR causes cardiac amyloidosis in people who are elderly and is termed senile systemic amyloidosis (SSA) (also called senile cardiac amyloidosis (SCA) or cardiac amyloidosis). SSA often is accompanied by microscopic deposits in many other organs. TTR mutations accelerate the process of TTR amyloid formation and are the most important risk factor for the development of clinically significant TTR amyloidosis (also called ATTR (amyloidosis-transthyretin type)). More than 85 amyloidogenic TTR variants are known to cause systemic familial amyloidosis.

[0715] In some embodiments of the methods of the invention, the subject is suffering from transthyretin (TTR)-related familial amyloidotic polyneuropathy (FAP). Such subjects may suffer from ocular manifestations, such as vitreous opacity and glaucoma. It is known to one of skill in the art that amyloidogenic transthyretin (ATTR) synthesized by retinal pigment epithelium (RPE) plays important roles in the progression of ocular amyloidosis. Previous studies have shown that panretinal laser photocoagulation, which reduced the RPE cells, prevented the progression of amyloid deposition in the vitreous, indicating that the effective suppression of ATTR expression in RPE may become a novel therapy for ocular amyloidosis (see, e.g., Kawaji, T., et al., Ophthalmology. (2010) 117: 552-555). Another TTR-associated disease is hyperthyroxinemia, also known as “dystransthyretinemic hyperthyroxinemia” or “dysprealbuminemic hyperthyroxinemia”. This type of hyperthyroxinemia may be secondary to an increased association of thyroxine with TTR due to a mutant TTR molecule with increased affinity for thyroxine. See, e.g., Moses et al. (1982) J. Clin. Invest., 86, 2025-2033.

[0716] In some embodiments, the TTR-associated disorder is an ocular disease, e.g., Stargardt's disease, diabetic retinopathy, age-related macular degeneration (AMD), e.g., dry AMD and wet AMD, iris coloboma, comedogenic acne syndrome, microphthalmia, basal laminar drusen, diabetic macular edema, or retinal vein occlusion. In some embodiments, the RBP4-associate disorder is a metabolic disorder, e.g., a disorder of glucose and lipid homeostasis, e.g., insulin resistance associated with type II diabetes, or a cardiovascular disease.

[0717] As used herein, the term “Stargardt's Disease” refers to a genetic eye disorder that causes retinal degeneration and vision loss. Stargardt's disease is a form of macular degeneration, and is also called “juvenile macular degeneration” or “Stargardt macular degeneration.” Stargardt Disease is the most common form of inherited macular degeneration, affecting about 30,000 people in the U.S. The progressive vision loss associated with Stargardt disease is caused by the degeneration of photoreceptor cells in the central portion of the retina called the macula. The macula is responsible for sharp central vision, which is needed for detailed tasks such as reading, driving, and recognizing faces. In most people with Stargardt's Disease, a fatty yellow pigment (lipofuscin) builds up in cells underlying the macula. Over time, the abnormal accumulation of this substance can damage cells that are critical for clear central vision. In addition to central vision loss, people with Stargardt's Disease have problems with night vision that can make it difficult to navigate in low light. Some affected individuals also have impaired color vision. The signs and symptoms of Stargardt's Disease typically appear in late childhood to early adulthood and worsen over time.

[0718] Increased synthesis and excessive accumulation of cytotoxic lipofuscin, e.g., lipid-protein-retinoid aggregates, in the RPE was shown in a mouse model of Stargardt's disease (Abca4^{-/-}). The major cytotoxic component of RPE lipofuscin is bisretinoid. Lipofuscin synthesis in the retina depends on the influx of serum retinol from the circulation into the RPE, and formation of the tertiary RBP4/TTR/retinol complex in the serum is required for this influx. As shown by Racz et al, administering a non-retinoid RBP4 antagonist to Abca4^{-/-} mice significantly reduced serum RBP4 levels and inhibited bisretinoid synthesis (Racz et al. J Biol Chem. 2018, 20; 293(29):11574-11588), which represents a potential treatment strategy for Stargardt's disease and other disorders characterized by excessive accumulation of lipofuscin.

[0719] As used herein, the term “age-related macular degeneration” (“AMD”) or “macular degeneration” refers to a progressive degeneration of the macular, the central part of the retina, in people over 55 years of age. AMD accounts for 8.7% of all blindess worldwide. AMD is characterized by large drusen deposits (deposits containing lipids and proteins) under the retina. When AMD damages the macula, the center part of a person's vision may become blurred or wavy, and a blind spot may develop. AMD can cause vision loss quickly or slowly, and can make it very hard to do things that require sharp vision, such as reading, sewing, cooking or driving; it can also make it difficult to see in dim light. There are two types of AMD, referred to as wet AMD and dry AMD.

[0720] Macular degeneration is initiated and perpetuated by the accumulation of toxic vitamin A derivatives in the retinal pigment epithelium (RPE). Pharmacological inhibition of vitamin A delivery or metabolism in the RPE can significantly slow and reduce vision loss in animal models of macular degeneration. Inhibitory peptides that block interaction between RBP4 and its receptor, STRA6, were shown to reduce vitamin A delivery to RPE, and could serve as the basis for the development of a therapeutic to treat macular degeneration (Farjo, et al., 2013, ARVO Annual Meeting, 54(15), 1702).

[0721] “Wet AMD,” also called “neovascular AMD” or “wet macular degeneration” is characterized by pathological blood vessel growth from the choroid into the retina (choroidal neovascularization), driven largely by excessive vascular endothelial growth factor (VEGF) production by the retinal pigment epithelium (RPE).

[0722] “Dry AMD,” also called “geographic atrophy” or “dry macular degeneration” is caused by RPE cell death and photoreceptor degeneration, leading to vision loss.

[0723] As used herein, the term “diabetic retinopathy” (“DR”) refers to an eye condition that can cause vision loss and blindness in people who have diabetes. It's caused by damage to the blood vessels of the light-sensitive tissue at the back of the eye (retina). At first, diabetic retinopathy may cause no symptoms or only mild vision problems. Eventually, it can cause blindness. Despite intensive glycemic control, 80% of Type 2 diabetes patients will progress to DR within 15 years of disease onset. In addition, diabetic retinopathy develops in 70-100% of individuals with Type 1 diabetes. In early stages, patients may present with microaneurysm, hard exudates, hemorrhages and cotton-wool spots in the fundus. As the disease progress, new blood vessels may grow due to ischemia but they are fragile, can cause hemorrhage and ultimately destroy the retina. The management of DR revolves around panretinal laser photocoagulation for proliferative disease while diabetic macular edema is treated by focal or a grid laser treatment and intraocular anti-VEGF agents and steroids. Current DR therapies are associated with inconvenient delivery (laser surgery, frequent intraocular injections) and unpleasant side-effects (steroid-induced glaucoma and cataract). Recent studies have shown that RBP4 plasma levels were associated with diabetic retinopathy in pateints with type 2 diabetes, and patients in a higher level of RBP4 had a greater risk of developing diabetic retinopathy (Li et al., Biosci Rep. 2018 Oct. 31; 38(5): BSR20181100), suggesting a possible role of RBP4 in the pathogenesis of DR complications.

[0724] As used herein, the term “diabetic macular edema” (“DME”) refers to a form of diabetic retinopathy (DR), where the diseased vessels in the retina leak fluid from the circulation into the macula, leading to severe vision loss.

[0725] As used herein, the term “basal laminal drusen” (“BLD”), also called “cuticular drusen” or “early adult onset, grouped drusen”, refers to a condition in which small drusen randomly deposit in the macula. In late stages, these drusen become more numerous and scatter throughout the retina, which may ultimately lead to a serious pigment epithelial detachment of the macula and result in vision loss. The drusen deposits are often autofluorescent.

[0726] As used herein, the term “retinal vein occlusion” (“RVO”) refers to a blockage of the small veins that carry blood away from the retina, which is subdivided into central and branch RVO. Central RVO is caused by impaired outflow from the central retinal vein, while branch RVO arises when a branch of the central vein is occluded. Due to the occlusion, the retina is likely to develop ischemia, resulting in increase in VEGF and inflammatory proteins, which may drive the development of macular edema, neovascularization, glaucoma and ultimately blindness if untreated. The occlusion in RVO cannot be treated, but complications can be managed by methods such as focal laser treatment for macular edema or anti-VEGF for neovascularization.

[0727] A “TTR-associated ocular disorder” includes any ocular disease associated with the TTR and/or RBP4 gene or protein in the eye that would benefit from reduction in TTR expression. Such TTR-associated ocular diseases are characterized by, for example, accumulation of lipofuscin pigment (Stargardt's disease), deposits of byproducts of ocular cell metabolism termed drusen in the macula (AMD and BLD) or neovascularization in the choroid or retina (AMD, DR, DME, RVO) which accumulate and lead to obstruction of light transmission, tissue damage, and visual dysfunction or loss.

[0728] Additional symptoms for an TTR-associated ocular disease include, for example, difficulty seeing in the center of the vision, which is needed for reading, sewing, cooking, looking at faces, and driving, trouble seeing in dim light, detecting small blind spots, blurred and distorted vision, decreased dark adaption, light sensitivity, poor color vision, or floating spots or dark strings. Further details regarding signs and symptoms of the various diseases or conditions are provided herein and are well known in the art.

[0729] In addition to ocular diseases, TTR is further implicated in a variety of human metabolic disorders, such as disorders of glucose and lipid homeostasis and cardiovascular diseases.

[0730] As used herein, a “metabolic disorder” refers to any disease or disorder that disrupts normal metabolism, the process of converting food to energy on a cellular level. Metabolic disorders affect the ability of the cell to perform critical biochemical reactions that involve the processing or transport of proteins (amino acids), carbohydrates (sugars and starches), or lipids (fatty acids). In some embodiments, an RBP4-associated disorder is a metabolic disorder, e.g., a disorder of glucose and lipid homeostasis, or a cardiovascular disease.

[0731] As used herein, a “disorder of glucose and lipid homeostasis” refers to any disease or disorder that disrupts normal glucose and/or lipid metabolism. Examples of disorders of glucose and lipid homeostasis include, but are not limited to, diabetes, type I diabetes, type II diabetes, galactosemia, hereditary fructose intolerance, fructose 1,6-diphosphatase deficiency, glycogen storage disorders, congenital disorders of glycosylation, insulin resistance, insulin insufficiency, hyperinsulinemia, impaired glucose tolerance (IGT), atherosclerosis, dyslipidemia, hypertriglyceridemia (including drug-induced hypertriglyceridemia, diuretic-induced hypertriglyceridemia, alcohol-induced hypertriglyceridemia, β-adrenergic blocking agent-induced hypertriglyceridemia, estrogen-induced hypertriglyceridemia, glucocorticoid-induced hypertriglyceridemia, retinoid-induced hypertriglyceridemia, cimetidine-induced hypertriglyceridemia, and familial hypertriglyceridemia), acute pancreatitis associated with hypertriglyceridemia, chylomicron syndrom, familial chylomicronemia, Apo-E deficiency or resistance, LPL deficiency or hypoactivity, hyperlipidemia (including familial combined hyperlipidemia), hypercholesterolemia, gout associated with hypercholesterolemia, xanthomatosis (subcutaneous cholesterol deposits), hyperlipidemia with heterogeneous LPL deficiency, hyperlipidemia with high LDL and heterogeneous LPL deficiency, fatty liver disease, or non-alcoholic stetohepatitis (NASH).

[0732] As used herein, the term “diabetes” refers to a group of metabolic diseases characterized by high blood sugar (glucose) levels which result from defects in insulin secretion or action, or both. There are two most common types of diabetes, namely type 1 diabetes and type 2 diabetes, which both result from the body's inability to regulate insulin. Insulin is a hormone released by the pancreas in response to increased levels of blood sugar (glucose) in the blood.

[0733] The term “type I diabetes,” as used herein, refers to a chronic disease that occurs when the pancreas produces too little insulin to regulate blood sugar levels appropriately. Type I diabetes is also referred to as insulin-dependent diabetes mellitus, IDDM, and juvenile onset diabetes. People with type I diabetes (insulin-dependent diabetes) produce little or no insulin at all. Although about 6 percent of the United States population has some form of diabetes, only about 10 percent of all diabetics have type I disorder. Most people who have type I diabetes developed the disorder before age 30. Type 1 diabetes represents the result of a progressive autoimmune destruction of the pancreatic β-cells with subsequent insulin deficiency. More than 90 percent of the insulin-producing cells (beta cells) of the pancreas are permanently destroyed. The resulting insulin deficiency is severe, and to survive, a person with type I diabetes must regularly inject insulin.

[0734] In type II diabetes (also referred to as noninsulin-dependent diabetes mellitus, NDDM), the pancreas continues to manufacture insulin, sometimes even at higher than normal levels. However, the body develops insulin resistance and dysregulated insulin secretion. Type II diabetes may occur in children and adolescents but usually begins after age 30 and becomes progressively more common with age: about 15 percent of people over age 70 have type II diabetes. Obesity is a risk factor for type II diabetes, and 80 to 90 percent of the people with this disorder are obese. In some embodiments, diabetes includes pre-diabetes. “Pre-diabetes” refers to one or more early diabetic conditions including impaired glucose utilization, abnormal or impaired fasting glucose levels, impaired glucose tolerance, impaired insulin sensitivity and insulin resistance. Prediabetes is a major risk factor for the development of type 2 diabetes mellitus, cardiovascular disease and mortality. Much focus has been given to developing therapeutic interventions that prevent the development of type 2 diabetes by effectively treating prediabetes.

[0735] Diabetes can be diagnosed by the administration of a glucose tolerance test. Clinically, diabetes is often divided into several basic categories. Primary examples of these categories include, autoimmune diabetes mellitus, non-insulin-dependent diabetes mellitus (type 1 NDDM), insulin-dependent diabetes mellitus (type 2 IDDM), non-autoimmune diabetes mellitus, non-insulin-dependent diabetes mellitus (type 2 NIDDM), and maturity-onset diabetes of the young (MODY). A further category, often referred to as secondary, refers to diabetes brought about by some identifiable condition which causes or allows a diabetic syndrome to develop. Examples of secondary categories include, diabetes caused by pancreatic disease, hormonal abnormalities, drug- or chemical-induced diabetes, diabetes caused by insulin receptor abnormalities, diabetes associated with genetic syndromes, and diabetes of other causes. (see e.g., Harrison's (1996) 14th ed., New York, McGraw-Hill).

[0736] Cardiovascular diseases are also considered “metabolic disorders”, as defined herein. These diseases may include coronary artery disease (also called ischemic heart disease), inflammation associated with coronary artery disease, restenosis, peripheral vascular diseases, and stroke.

[0737] Disorders related to body weight are also considered “metabolic disorders”, as defined herein. Such disorders may include obesity, metabolic syndrome including independent components of metabolic syndrome (e.g., central obesity, FBG/pre-diabetes/diabetes, hypercholesterolemia, hypertriglyceridemia, and hypertension), hypothyroidism, uremia, and other conditions associated with weight gain (including rapid weight gain), weight loss, maintenance of weight loss, or risk of weight regain following weight loss.

[0738] In some embodiments, the RNAi agent is administered to a subject in an amount effective to inhibit TTR expression in a cell within the subject. The amount effective to inhibit TTR expression in a cell within a subject may be assessed using methods discussed above, including methods that involve assessment of the inhibition of TTR mRNA, TTR protein, or related variables, such as a reduction in the severity of a symptom of an TTR-associate disorder, e.g., reduction insensory neuropathy (e.g., paresthesia, hypesthesia in distal limbs), autonomic neuropathy (e.g., gastrointestinal dysfunction, such as gastric ulcer, or orthostatic hypotension), motor neuropathy, seizures, dementia, myelopathy, polyneuropathy, carpal tunnel syndrome, autonomic insufficiency, cardiomyopathy, vitreous opacities, renal insufficiency, nephropathy, substantially reduced mBMI (modified Body Mass Index), cranial nerve dysfunction, and corneal lattice dystrophy.

[0739] An iRNA of the invention may be administered as a “free iRNA.” A free iRNA is administered in the absence of a pharmaceutical composition. The naked iRNA may be in a suitable buffer solution. The buffer solution may comprise acetate, citrate, prolamine, carbonate, or phosphate, or any combination thereof. In one embodiment, the buffer solution is phosphate buffered saline (PBS). The pH and osmolarity of the buffer solution containing the iRNA can be adjusted such that it is suitable for administering to a subject.

[0740] Alternatively, an iRNA of the invention may be administered as a pharmaceutical composition, such as a dsRNA liposomal formulation.

[0741] Subjects that would benefit from an inhibition of TTR gene expression are subjects susceptible to or diagnosed with an TTR-associated disorder, such as senile systemic amyloidosis (SSA), systemic familial amyloidosis, familial amyloidotic polyneuropathy (FAP), familial amyloidotic cardiomyopathy (FAC), leptomeningeal/Central Nervous System (CNS) amyloidosis, hyperthyroxinemia, an ocular disease, e.g., Stargardt's disease, diabetic retinopathy, age-related macular degeneration (AMD), e.g., dry AMD and wet AMD; a metabolic disorder, e.g., a disorder of glucose and lipid homeostasis, e.g., insulin resistance associated with type II diabetes, and a cardiovascular disease. In an embodiment, the method includes administering a composition featured herein such that expression of the target ab TTR gene is decreased, such as for about 1, 2, 3, 4, 5, 6, 1-6, 1-3, or 3-6 months per dose. In certain embodiments, the composition is administered once every 3-6 months.

[0742] In one embodiment, the iRNAs useful for the methods and compositions featured herein specifically target RNAs (primary or processed) of the target TTR gene. Compositions and methods for inhibiting the expression of these genes using iRNAs can be prepared and performed as described herein.

[0743] Administration of the iRNA according to the methods of the invention may result prevention or treatment of an TTR-associated disorder, e.g., senile systemic amyloidosis (SSA), systemic familial amyloidosis, familial amyloidotic polyneuropathy (FAP), familial amyloidotic cardiomyopathy (FAC), leptomeningeal/Central Nervous System (CNS) amyloidosis, hyperthyroxinemia, an ocular disease, e.g., Stargardt's disease, diabetic retinopathy, age-related macular degeneration (AMD), e.g., dry AMD and wet AMD; a metabolic disorder, e.g., a disorder of glucose and lipid homeostasis, e.g., insulin resistance associated with type II diabetes, and a cardiovascular disease. Subjects can be administered a therapeutic amount of iRNA, such as about 0.01 mg/kg to about 200 mg/kg.

[0744] In one embodiment, the iRNA is administered subcutaneously, i.e., by subcutaneous injection. One or more injections may be used to deliver the desired dose of iRNA to a subject. The injections may be repeated over a period of time.

[0745] The administration may be repeated on a regular basis. In certain embodiments, after an initial treatment regimen, the treatments can be administered on a less frequent basis. A repeat-dose regimen may include administration of a therapeutic amount of iRNA on a regular basis, such as once per month to once a year. In certain embodiments, the iRNA is administered about once per month to about once every three months, or about once every three months to about once every six months.

[0746] The invention further provides methods and uses of an iRNA agent or a pharmaceutical composition thereof for treating a subject that would benefit from reduction and/or inhibition of TTR gene expression, e.g., a subject having an TTR-associated disorder, in combination with other pharmaceuticals and/or other therapeutic methods, e.g., with known pharmaceuticals and/or known therapeutic methods, such as, for example, those which are currently employed for treating these disorders.

[0747] Accordingly, in some aspects of the invention, the methods which include administration of an iRNA agent of the invention, further include administering to the subject one or more additional therapeutic agents. For example, in certain embodiments, an iRNA targeting TTR is administered in combination with, e.g., an agent useful in treating an TTR-associated disorder. Exemplary additional therapeutics and treatments for treating an TTR-associated disorder include, a TTR stabilizer and a non-steroidal anti-inflammatory agent (NSAIDS), e.g., diflunisal, and diuretics, and a combination of any of the foregoing.

[0748] A “therapeutic agent that stabilizes TTR” or “that stabilizes a TTR tetramer” is an agent that reduces or prevents the dissociation of the subunits of a TTR tetramer, e.g., into monomers. In some embodiments, the agent reduces the formation of TTR amyloid plaques, e.g., by reducing the level of TTR monomers or proteolytic fragments of TTR monomers that form TTR amyloid plaques. Such agents include, but are not limited to, tafamidis, diflunisal, and AG10.

[0749] The iRNA and additional therapeutic agents may be administered at the same time and/or in the same combination, e.g., parenterally, or the additional therapeutic agent can be administered as part of a separate composition or at separate times and/or by another method known in the art or described herein.

[0750] The iRNA agent and an additional therapeutic agent and/or treatment may be administered at the same time and/or in the same combination, e.g., parenterally, or the additional therapeutic agent can be administered as part of a separate composition or at separate times and/or by another method known in the art or described herein.

### VIII. Kits

[0751] In certain aspects, the instant disclosure provides kits that include a suitable container containing a pharmaceutical formulation of a siRNA compound, e.g., a double-stranded siRNA compound, or siRNA compound, (e.g., a precursor, e.g., a larger siRNA compound which can be processed into a siRNA compound, or a DNA which encodes an siRNA compound, e.g., a double-stranded siRNA compound, or ssiRNA compound, or precursor thereof).

[0752] Such kits include one or more dsRNA agent(s) and instructions for use, e.g., instructions for administering a prophylactically or therapeutically effective amount of a dsRNA agent(s). The dsRNA agent may be in a vial or a pre-filled syringe. The kits may optionally further comprise means for administering the dsRNA agent (e.g., an injection device, such as a pre-filled syringe or auto-injector device), or means for measuring the inhibition of TTR (e.g., means for measuring the inhibition of TTR mRNA, TTR protein, and/or TTR activity). Such means for measuring the inhibition of TTR may comprise a means for obtaining a sample from a subject, such as, e.g., a plasma sample. The kits of the invention may optionally further comprise means for determining the therapeutically effective or prophylactically effective amount.

[0753] In certain embodiments the individual components of the pharmaceutical formulation may be provided in one container, e.g., a vial or a pre-filled syringe. Alternatively, it may be desirable to provide the components of the pharmaceutical formulation separately in two or more containers, e.g., one container for a siRNA compound preparation, and at least another for a carrier compound. The kit may be packaged in a number of different configurations such as one or more containers in a single box. The different components can be combined, e.g., according to instructions provided with the kit.

[0754] The components can be combined according to a method described herein, e.g., to prepare and administer a pharmaceutical composition. The kit can also include a delivery device.

[0755] This invention is further illustrated by the following examples which should not be construed as limiting. The entire contents of all references, patents and published patent applications cited throughout this application, as well as the informal Sequence Listing and Figures, are hereby incorporated herein by reference.

### EXAMPLES

### Example 1. iRNA Synthesis

### Source of Reagents

[0756] Where the source of a reagent is not specifically given herein, such reagent can be obtained from any supplier of reagents for molecular biology at a quality/purity standard for application in molecular biology.

siRNA Design

[0757] siRNAs targeting the 3′UTR of the human transthyretin (TTR) gene (human: NCBI refseqID NM_000371.4, NCBI GeneID: 7276) were designed using custom R and Python scripts. The human NM_000505.4 REFSEQ mRNA, has a length of 616 bases.

[0758] Detailed lists of the unmodified TTR sense and antisense strand nucleotide sequences are shown in Table 2. Detailed lists of the modified TTR sense and antisense strand nucleotide sequences are shown in Table 3.

[0759] It is to be understood that, throughout the application, a duplex name without a decimal is equivalent to a duplex name with a decimal which merely references the batch number of the duplex.

[0760] For example, AD-959917 is equivalent to AD-959917.1.

siRNA Synthesis

[0761] siRNAs were designed, synthesized, and prepared using methods known in the art.

[0762] Briefly, siRNA sequences were synthesized on a 1 μmol scale using a Mermade 192 synthesizer (BioAutomation) with phosphoramidite chemistry on solid supports. The solid support was controlled pore glass (500-1000 Å) loaded with a custom GalNAc ligand (3′-GalNAc conjugates), universal solid support (AM Chemicals), or the first nucleotide of interest. Ancillary synthesis reagents and standard 2-cyanoethyl phosphoramidite monomers (2′-deoxy-2′-fluoro, 2′-O-methyl, RNA, DNA) were obtained from Thermo-Fisher (Milwaukee, Wis.), Hongene (China), or Chemgenes (Wilmington, Mass., USA). Additional phosphoramidite monomers were procured from commercial suppliers, prepared in-house, or procured using custom synthesis from various CMOs. Phosphoramidites were prepared at a concentration of 100 mM in either acetonitrile or 9:1 acetonitrile:DMF and were coupled using 5-Ethylthio-1H-tetrazole (ETT, 0.25 M in acetonitrile) with a reaction time of 400 s. Phosphorothioate linkages were generated using a 100 mM solution of 3-((Dimethylamino-methylidene) amino)-3H-1,2,4-dithiazole-3-thione (DDTT, obtained from Chemgenes (Wilmington, Mass., USA)) in anhydrous acetonitrile/pyridine (9:1 v/v). Oxidation time was 5 minutes. All sequences were synthesized with final removal of the DMT group (“DMT-Off”).

[0763] Upon completion of the solid phase synthesis, solid-supported oligoribonucleotides were treated with 300 μL of Methylamine (40% aqueous) at room temperature in 96 well plates for approximately 2 hours to afford cleavage from the solid support and subsequent removal of all additional base-labile protecting groups. For sequences containing any natural ribonucleotide linkages (2′-OH) protected with a tert-butyl dimethyl silyl (TBDMS) group, a second deprotection step was performed using TEA.3HF (triethylamine trihydrofluoride). To each oligonucleotide solution in aqueous methylamine was added 200 μL of dimethyl sulfoxide (DMSO) and 300 μL TEA.3HF and the solution was incubated for approximately 30 mins at 60° C. After incubation, the plate was allowed to come to room temperature and crude oligonucleotides were precipitated by the addition of 1 mL of 9:1 acetontrile:ethanol or 1:1 ethanol:isopropanol. The plates were then centrifuged at 4° C. for 45 mins and the supernatant carefully decanted with the aid of a multichannel pipette. The oligonucleotide pellet was resuspended in 20 mM NaOAc and subsequently desalted using a HiTrap size exclusion column (5 mL, GE Healthcare) on an Agilent LC system equipped with an autosampler, UV detector, conductivity meter, and fraction collector. Desalted samples were collected in 96 well plates and then analyzed by LC-MS and UV spectrometry to confirm identity and quantify the amount of material, respectively.

[0764] Duplexing of single strands was performed on a Tecan liquid handling robot. Sense and antisense single strands were combined in an equimolar ratio to a final concentration of 10 μM in 1×PBS in 96 well plates, the plate sealed, incubated at 100° C. for 10 minutes, and subsequently allowed to return slowly to room temperature over a period of 2-3 hours. The concentration and identity of each duplex was confirmed and then subsequently utilized for in vitro screening assays.

### Example 2. In Vitro Screening Methods

### Cell Culture and 384-Well Transfections

[0765] Hep3b cells (ATCC, Manassas, Va.) are grown to near confluence at 37° C. in an atmosphere of 5% CO₂ in Eagle's Minimum Essential Medium (Gibco) supplemented with 10% FBS (ATCC) before being released from the plate by trypsinization. Transfection is carried out by adding 7.5 μl of Opti-MEM plus 0.1 μl of Lipofectamine RNAiMax per well (Invitrogen, Carlsbad Calif. cat #13778-150) to 2.5 μl of each siRNA duplex to an individual well in a 384-well plate. The mixture is then incubated at room temperature for 15 minutes. Forty μl of complete growth media without antibiotic containing ˜1.5×10⁴ cells are then added to the siRNA mixture. Cells are incubated for 24 hours prior to RNA purification. Single dose experiments are performed at 10 nM, 1 nM, and 0.1 nM final duplex concentration.

[0766] Total RNA Isolation Using DYNABEADS mRNA Isolation Kit (Invitrogen™, Part #: 610-12)

[0767] Cells are lysed in 75 μl of Lysis/Binding Buffer containing 3 μL of beads per well and mixed for 10 minutes on an electrostatic shaker. The washing steps are automated on a Biotek EL406, using a magnetic plate support. Beads are washed (in 90 L) once in Buffer A, once in Buffer B, and twice in Buffer E, with aspiration steps in between. Following a final aspiration, complete 10 μL RT mixture is added to each well, as described below.

[0768] cDNA Synthesis Using ABI High Capacity cDNA Reverse Transcription Kit (Applied Biosystems, Foster City, Calif., Cat #4368813)

[0769] A master mix of 1 μl 10× Buffer, 0.4 μl 25× dNTPs, 1 μl Random primers, 0.5 μl Reverse Transcriptase, 0.5 μl RNase inhibitor and 6.6 μl of H₂O per reaction are added per well. Plates are sealed, agitated for 10 minutes on an electrostatic shaker, and then incubated at 37 degrees C. for 2 hours. Following this, the plates are agitated at 80 degrees C. for 8 minutes.

[0770] Real Time PCR

[0771] Two microlitre (μl) of cDNA are added to a master mix containing 0.5 μl of human GAPDH TaqMan Probe (4326317E), 0.5 μl human TTR, 2 μl nuclease-free water and 5 μl Lightcycler 480 probe master mix (Roche Cat #04887301001) per well in a 384 well plates (Roche cat #04887301001). Real time PCR is done in a LightCycler480 Real Time PCR system (Roche).

[0772] To calculate relative fold change, data are analyzed using the ΔΔCt method and normalized to assays performed with cells transfected with 10 nM AD-1955, or mock transfected cells. IC₅₀s are calculated using a 4 parameter fit model using XLFit and normalized to cells transfected with AD-1955 or mock-transfected. The sense and antisense sequences of AD-1955 are: sense: cuuAcGcuGAGuAcuucGAdTsdT and antisense UCGAAGuACUcAGCGuAAGdTsdT.

[0773] The results of the single dose screens of the duplexes in Tables 2 and 3 in Cynomolgus hepatocytes cells are provided in Table 4.

TABLE 1
Abbreviations of nucleotide monomers used in nucleic acid sequence representation. It will
be understood that these monomers, when present in an oligonucleotide, are mutually linked by 5′-3′-
phosphodiester bonds; and it is understood that when the nucleotide contains a 2′-fluoro modification,
then the fluoro replaces the hydroxy at that position in the parent nucleotide (i.e., it is a 2′-deoxy-2′-
fluoronucleotide).

| Abbreviation | Nucleotide(s) |
|---|---|
| A | Adenosine-3′-phosphate |
| Ab | beta-L-adenosine-3′-phosphate |
| Abs | beta-L-adenosine-3′-phosphorothioate |
| Af | 2′-fluoroadenosine-3′-phosphate |
| Afs | 2′-fluoroadenosine-3′-phosphorothioate |
| As | adenosine-3′-phosphorothioate |
| C | cytidine-3′-phosphate |
| Cb | beta-L-cytidine-3′-phosphate |
| Cbs | beta-L-cytidine-3′-phosphorothioate |
| Cf | 2′-fluorocytidine-3′-phosphate |
| Cfs | 2′-fluorocytidine-3′-phosphorothioate |
| Cs | cytidine-3′-phosphorothioate |
| G | guanosine-3′-phosphate |
| Gb | beta-L-guanosine-3′-phosphate |
| Gbs | beta-L-guanosine-3′-phosphorothioate |
| Gf | 2′-fluoroguanosine-3′-phosphate |
| Gfs | 2′-fluoroguanosine-3′-phosphorothioate |
| Gs | guanosine-3′-phosphorothioate |
| T | 5′-methyluridine-3′-phosphate |
| Tf | 2′-fluoro-5-methyluridine-3′-phosphate |
| Tfs | 2′-fluoro-5-methyluridine-3′-phosphorothioate |
| Ts | 5-methyluridine-3′-phosphorothioate |
| U | Uridine-3′-phosphate |
| Uf | 2′-fluorouridine-3′-phosphate |
| Ufs | 2′-fluorouridine-3′-phosphorothioate |
| Us | uridine-3′-phosphorothioate |
| N | any nucleotide, modified or unmodified |
| a | 2′-O-methyladenosine-3′-phosphate |
| as | 2′-O-methyladenosine-3′- phosphorothioate |
| c | 2′-O-methylcytidine-3′-phosphate |
| cs | 2′-O-methylcytidine-3′- phosphorothioate |
| g | 2′-O-methylguanosine-3′-phosphate |
| gs | 2′-O-methylguanosine-3′-phosphorothioate |
| t | 2′-O-methyl-5-methyluridine-3′-phosphate |
| ts | 2′-O-methyl-5-methyluridine-3′-phosphorothioate |
| u | 2′-O-methyluridine-3′-phosphate |
| us | 2′-O-methyluridine-3′-phosphorothioate |
| s | phosphorothioate linkage |
| L10 | N-(cholesterylcarboxamidocaproyl)-4-hydroxyprolinol (Hyp-C6-Chol) |
| L96 | N-[tris(GalNAc-alkyl)-amidodecanoyl)]-4-hydroxyprolinol |
| | (Hyp-(GalNAc-alkyl)3) |
| | [chemical structure] |
| Y34 | 2-hydroxymethyl-tetrahydrofurane-4-methoxy-3-phosphate (abasic 2′-OMe |
| | furanose) |
| Y44 | inverted abasic DNA (2-hydroxymethyl-tetrahydrofurane-5-phosphate) |
| (Agn) | Adenosine-glycol nucleic acid (GNA) |
| (Cgn) | Cytidine-glycol nucleic acid (GNA) |
| (Ggn) | Guanosine-glycol nucleic acid (GNA) |
| (Tgn) | Thymidine-glycol nucleic acid (GNA) S-Isomer |
| P | Phosphate |
| VP | Vinyl-phosphonate |
| dA | 2′-deoxyadenosine-3′-phosphate |
| dAs | 2′-deoxyadenosine-3′-phosphorothioate |
| dC | 2′-deoxycytidine-3′-phosphate |
| dCs | 2′-deoxycytidine-3′-phosphorothioate |
| dG | 2′-deoxyguanosine-3′-phosphate |
| dGs | 2′-deoxyguanosine-3′-phosphorothioate |
| dT | 2′-deoxythimidine-3′-phosphate |
| dTs | 2′-deoxythimidine-3′-phosphorothioate |
| dU | 2′-deoxyuridine |
| dUs | 2′-deoxyuridine-3′-phosphorothioate |
| (C2p) | cytidine-2′-phosphate |
| (G2p) | guanosine-2′-phosphate |
| (U2p) | uridine-2′-phosphate |
| (A2p) | adenosine-2′-phosphate |
| (Chd) | 2′-O-hexadecyl-cytidine-3′-phosphate |
| (Ahd) | 2′-O-hexadecyl-adenosine-3′-phosphate |
| (Ghd) | 2′-O-hexadecyl-guanosine-3′-phosphate |
| (Uhd) | 2′-O-hexadecyl-uridine-3′-phosphate |

TABLE 2
Unmodified Sense and Antisense Strand Sequences of TTR dsRNA Agents

| Duplex | | SEQ ID | | SEQ ID | Range in |
|---|---|---|---|---|---|
| Name | Sense Sequence 5′ to 3′ | NO: | Antisense Sequence 5′ to 3′ | NO: | NM_000371.4 |
| AD-649237 | CUGAAGGACGAGGGAUGGGAU | | AUCCCAUCCCUCGUCCUUCAGGU | | 600-622 |
| AD-649238 | UGAAGGACGAGGGAUGGGAUU | | AAUCCCAUCCCUCGUCCUUCAGG | | 601-623 |
| AD-649239 | GAAGGACGAGGGAUGGGAUUU | | AAAUCCCAUCCCUCGUCCUUCAG | | 602-624 |
| AD-649240 | AAGGACGAGGGAUGGGAUUUU | | AAAAUCCCAUCCCUCGUCCUUCA | | 603-625 |
| AD-649241 | AGGACGAGGGAUGGGAUUUCA | | UGAAAUCCCAUCCCUCGUCCUUC | | 604-626 |
| AD-649242 | GGACGAGGGAUGGGAUUUCAU | | AUGAAAUCCCAUCCCUCGUCCUU | | 605-627 |
| AD-649243 | GACGAGGGAUGGGAUUUCAUU | | AAUGAAAUCCCAUCCCUCGUCCU | | 606-628 |
| AD-649244 | ACGAGGGAUGGGAUUUCAUGU | | ACAUGAAAUCCCAUCCCUCGUCC | | 607-629 |
| AD-649245 | CGAGGGAUGGGAUUUCAUGUA | | UACAUGAAAUCCCAUCCCUCGUC | | 608-630 |
| AD-649246 | GAGGGAUGGGAUUUCAUGUAA | | UUACAUGAAAUCCCAUCCCUCGU | | 609-631 |
| AD-649247 | AGGGAUGGGAUUUCAUGUAAU | | AUUACAUGAAAUCCCAUCCCUCG | | 610-632 |
| AD-649248 | GGGAUGGGAUUUCAUGUAACU | | AGUUACAUGAAAUCCCAUCCCUC | | 611-633 |
| AD-649249 | GGAUGGGAUUUCAUGUAACCA | | UGGUUACAUGAAAUCCCAUCCCU | | 612-634 |
| AD-649250 | GAUGGGAUUUCAUGUAACCAA | | UUGGUUACAUGAAAUCCCAUCCC | | 613-635 |
| AD-649251 | AUGGGAUUUCAUGUAACCAAU | | AUUGGUUACAUGAAAUCCCAUCC | | 614-636 |
| AD-649252 | GGGAUUUCAUGUAACCAAGAU | | AUCUUGGUUACAUGAAAUCCCAU | | 616-638 |
| AD-649253 | GGAUUUCAUGUAACCAAGAGU | | ACUCUUGGUUACAUGAAAUCCCA | | 617-639 |
| AD-649254 | GAUUUCAUGUAACCAAGAGUA | | UACUCUUGGUUACAUGAAAUCCC | | 618-640 |
| AD-649255 | AUUUCAUGUAACCAAGAGUAU | | AUACUCUUGGUUACAUGAAAUCC | | 619-641 |
| AD-649256 | UUCAUGUAACCAAGAGUAUUU | | AAAUACUCUUGGUUACAUGAAAU | | 621-643 |
| AD-649258 | CAUGUAACCAAGAGUAUUCCA | | UGGAAUACUCUUGGUUACAUGAA | | 623-645 |
| AD-649259 | AUGUAACCAAGAGUAUUCCAU | | AUGGAAUACUCUUGGUUACAUGA | | 624-646 |
| AD-649260 | GUAACCAAGAGUAUUCCAUUU | | AAAUGGAAUACUCUUGGUUACAU | | 626-648 |
| AD-649261 | UAACCAAGAGUAUUCCAUUUU | | AAAAUGGAAUACUCUUGGUUACA | | 627-649 |
| AD-649262 | ACCAAGAGUAUUCCAUUUUUA | | UAAAAAUGGAAUACUCUUGGUUA | | 629-651 |
| AD-649263 | CCAAGAGUAUUCCAUUUUUAU | | AUAAAAAUGGAAUACUCUUGGUU | | 630-652 |
| AD-649264 | CAAGAGUAUUCCAUUUUUACU | | AGUAAAAAUGGAAUACUCUUGGU | | 631-653 |
| AD-649265 | AAGAGUAUUCCAUUUUUACUA | | UAGUAAAAAUGGAAUACUCUUGG | | 632-654 |
| AD-649266 | AGAGUAUUCCAUUUUUACUAA | | UUAGUAAAAAUGGAAUACUCUUG | | 633-655 |
| AD-649267 | GAGUAUUCCAUUUUUACUAAA | | UUUAGUAAAAAUGGAAUACUCUU | | 634-656 |
| AD-649268 | AGUAUUCCAUUUUUACUAAAU | | AUUUAGUAAAAAUGGAAUACUCU | | 635-657 |
| AD-649269 | GUAUUCCAUUUUUACUAAAGU | | ACUUUAGUAAAAAUGGAAUACUC | | 636-658 |
| AD-649270 | UAUUCCAUUUUUACUAAAGCA | | UGCUUUAGUAAAAAUGGAAUACU | | 637-659 |
| AD-649271 | AUUCCAUUUUUACUAAAGCAU | | AUGCUUUAGUAAAAAUGGAAUAC | | 638-660 |
| AD-649272 | UUCCAUUUUUACUAAAGCAGU | | ACUGCUUUAGUAAAAAUGGAAUA | | 639-661 |
| AD-649274 | CCAUUUUUACUAAAGCAGUGU | | ACACUGCUUUAGUAAAAAUGGAA | | 641-663 |
| AD-649275 | CAUUUUUACUAAAGCAGUGUU | | AACACUGCUUUAGUAAAAAUGGA | | 642-664 |
| AD-649276 | AUUUUUACUAAAGCAGUGUUU | | AAACACUGCUUUAGUAAAAAUGG | | 643-665 |
| AD-649277 | UUUUACUAAAGCAGUGUUUUU | | AAAAACACUGCUUUAGUAAAAAU | | 645-667 |
| AD-649278 | UUUACUAAAGCAGUGUUUUCA | | UGAAAACACUGCUUUAGUAAAAA | | 646-668 |
| AD-649279 | UUACUAAAGCAGUGUUUUCAU | | AUGAAAACACUGCUUUAGUAAAA | | 647-669 |
| AD-649280 | UACUAAAGCAGUGUUUUCACU | | AGUGAAAACACUGCUUUAGUAAA | | 648-670 |
| AD-649281 | ACUAAAGCAGUGUUUUCACCU | | AGGUGAAAACACUGCUUUAGUAA | | 649-671 |
| AD-649282 | CUAAAGCAGUGUUUUCACCUU | | AAGGUGAAAACACUGCUUUAGUA | | 650-672 |
| AD-649283 | UAAAGCAGUGUUUUCACCUCA | | UGAGGUGAAAACACUGCUUUAGU | | 651-673 |
| AD-649284 | AAAGCAGUGUUUUCACCUCAU | | AUGAGGUGAAAACACUGCUUUAG | | 652-674 |
| AD-649285 | AAGCAGUGUUUUCACCUCAUA | | UAUGAGGUGAAAACACUGCUUUA | | 653-675 |
| AD-649286 | AGCAGUGUUUUCACCUCAUAU | | AUAUGAGGUGAAAACACUGCUUU | | 654-676 |
| AD-649287 | AGAAGUCCAGGCAGAGACAAU | | AUUGUCUCUGCCUGGACUUCUAA | | 683-705 |
| AD-649288 | GAAGUCCAGGCAGAGACAAUA | | UAUUGUCUCUGCCUGGACUUCUA | | 684-706 |
| AD-649290 | AGUCCAGGCAGAGACAAUAAA | | UUUAUUGUCUCUGCCUGGACUUC | | 686-708 |
| AD-649291 | GUCCAGGCAGAGACAAUAAAA | | UUUUAUUGUCUCUGCCUGGACUU | | 687-709 |
| AD-649292 | UCCAGGCAGAGACAAUAAAAU | | AUUUUAUUGUCUCUGCCUGGACU | | 688-710 |
| AD-649293 | CCAGGCAGAGACAAUAAAACA | | UGUUUUAUUGUCUCUGCCUGGAC | | 689-711 |
| AD-649294 | CAGGCAGAGACAAUAAAACAU | | AUGUUUUAUUGUCUCUGCCUGGA | | 690-712 |
| AD-649295 | AGGCAGAGACAAUAAAACAUU | | AAUGUUUUAUUGUCUCUGCCUGG | | 691-713 |
| AD-649296 | GGCAGAGACAAUAAAACAUUU | | AAAUGUUUUAUUGUCUCUGCCUG | | 692-714 |
| AD-649297 | GCAGAGACAAUAAAACAUUCU | | AGAAUGUUUUAUUGUCUCUGCCU | | 693-715 |
| AD-649298 | AGAGACAAUAAAACAUUCCUU | | AAGGAAUGUUUUAUUGUCUCUGC | | 695-717 |
| AD-649299 | GAGACAAUAAAACAUUCCUGU | | ACAGGAAUGUUUUAUUGUCUCUG | | 696-718 |
| AD-649300 | AGACAAUAAAACAUUCCUGUU | | AACAGGAAUGUUUUAUUGUCUCU | | 697-719 |
| AD-649301 | GACAAUAAAACAUUCCUGUGA | | UCACAGGAAUGUUUUAUUGUCUC | | 698-720 |
| AD-649302 | ACAAUAAAACAUUCCUGUGAA | | UUCACAGGAAUGUUUUAUUGUCU | | 699-721 |
| AD-649303 | AAUAAAACAUUCCUGUGAAAU | | AUUUCACAGGAAUGUUUUAUUGU | | 701-723 |
| AD-649304 | AUAAAACAUUCCUGUGAAAGU | | ACUUUCACAGGAAUGUUUUAUUG | | 702-724 |
| AD-649305 | UAAAACAUUCCUGUGAAAGGU | | ACCUUUCACAGGAAUGUUUUAUU | | 703-725 |
| AD-649306 | AAAACAUUCCUGUGAAAGGCA | | UGCCUUUCACAGGAAUGUUUUAU | | 704-726 |
| AD-649307 | AAACAUUCCUGUGAAAGGCAU | | AUGCCUUUCACAGGAAUGUUUUA | | 705-727 |
| AD-649308 | AACAUUCCUGUGAAAGGCACU | | AGUGCCUUUCACAGGAAUGUUUU | | 706-728 |
| AD-649309 | ACAUUCCUGUGAAAGGCACUU | | AAGUGCCUUUCACAGGAAUGUUU | | 707-729 |
| AD-649310 | CAUUCCUGUGAAAGGCACUUU | | AAAGUGCCUUUCACAGGAAUGUU | | 708-730 |
| AD-649311 | AUUCCUGUGAAAGGCACUUUU | | AAAAGUGCCUUUCACAGGAAUGU | | 709-731 |
| AD-649312 | UUCCUGUGAAAGGCACUUUUU | | AAAAAGUGCCUUUCACAGGAAUG | | 710-732 |
| AD-649313 | UCCUGUGAAAGGCACUUUUCA | | UGAAAAGUGCCUUUCACAGGAAU | | 711-733 |
| AD-649314 | CCUGUGAAAGGCACUUUUCAU | | AUGAAAAGUGCCUUUCACAGGAA | | 712-734 |
| AD-649315 | CUGUGAAAGGCACUUUUCAUU | | AAUGAAAAGUGCCUUUCACAGGA | | 713-735 |
| AD-649316 | UGUGAAAGGCACUUUUCAUUU | | AAAUGAAAAGUGCCUUUCACAGG | | 714-736 |
| AD-649318 | UGAAAGGCACUUUUCAUUCCA | | UGGAAUGAAAAGUGCCUUUCACA | | 716-738 |
| AD-649319 | GAAAGGCACUUUUCAUUCCAU | | AUGGAAUGAAAAGUGCCUUUCAC | | 717-739 |
| AD-649320 | CUGAAGGACGAGGGAUGGGAU | | AUCCCATCCCUCGUCCUUCAGGU | | 600-622 |
| AD-649321 | UGAAGGACGAGGGAUGGGAUU | | AAUCCCAUCCCUCGUCCUUCAGG | | 601-623 |
| AD-649322 | GAAGGACGAGGGAUGGGAUUU | | AAAUCCCAUCCCUCGUCCUUCAG | | 602-624 |
| AD-649323 | AAGGACGAGGGAUGGGAUUUU | | AAAAUCCCAUCCCUCGUCCUUCA | | 603-625 |
| AD-649324 | AGGACGAGGGAUGGGAUUUCA | | UGAAAUCCCAUCCCUCGUCCUUC | | 604-626 |
| AD-649325 | GGACGAGGGAUGGGAUUUCAU | | AUGAAATCCCAUCCCUCGUCCUU | | 605-627 |
| AD-649326 | GACGAGGGAUGGGAUUUCAUU | | AAUGAAAUCCCAUCCCUCGUCCU | | 606-628 |
| AD-649327 | ACGAGGGAUGGGAUUUCAUGU | | ACAUGAAAUCCCAUCCCUCGUCC | | 607-629 |
| AD-649328 | CGAGGGAUGGGAUUUCAUGUA | | UACAUGAAAUCCCAUCCCUCGUC | | 608-630 |
| AD-649329 | GAGGGAUGGGAUUUCAUGUAA | | UUACATGAAAUCCCAUCCCUCGU | | 609-631 |
| AD-649330 | AGGGAUGGGAUUUCAUGUAAU | | AUUACATGAAAUCCCAUCCCUCG | | 610-632 |
| AD-649331 | GGGAUGGGAUUUCAUGUAACU | | AGUUACAUGAAAUCCCAUCCCUC | | 611-633 |
| AD-649332 | GGAUGGGAUUUCAUGUAACCA | | UGGUUACAUGAAAUCCCAUCCCU | | 612-634 |
| AD-649333 | GAUGGGAUUUCAUGUAACCAA | | UUGGUUACAUGAAAUCCCAUCCC | | 613-635 |
| AD-649334 | AUGGGAUUUCAUGUAACCAAU | | AUUGGUTACAUGAAAUCCCAUCC | | 614-636 |
| AD-649335 | UGGGAUUUCAUGUAACCAAGA | | UCUUGGTUACAUGAAAUCCCAUC | | 505-527 |
| AD-649336 | GGGAUUUCAUGUAACCAAGAU | | AUCUUGGTUACAUGAAAUCCCAU | | 616-638 |
| AD-649337 | GGAUUUCAUGUAACCAAGAGU | | ACUCUTGGUUACAUGAAAUCCCA | | 617-639 |
| AD-649338 | GAUUUCAUGUAACCAAGAGUA | | UACUCUTGGUUACAUGAAAUCCC | | 618-640 |
| AD-649339 | AUUUCAUGUAACCAAGAGUAU | | AUACUCTUGGUUACAUGAAAUCC | | 619-641 |
| AD-649340 | UUUCAUGUAACCAAGAGUAUU | | AAUACUCUUGGUUACAUGAAAUC | | 620-642 |
| AD-649341 | UUCAUGUAACCAAGAGUAUUU | | AAAUACTCUUGGUUACAUGAAAU | | 621-643 |
| AD-649342 | UCAUGUAACCAAGAGUAUUCU | | AGAAUACUCUUGGUUACAUGAAA | | 622-644 |
| AD-649343 | CAUGUAACCAAGAGUAUUCCA | | UGGAAUACUCUUGGUUACAUGAA | | 623-645 |
| AD-649344 | AUGUAACCAAGAGUAUUCCAU | | AUGGAATACUCUUGGUUACAUGA | | 624-646 |
| AD-649345 | UGUAACCAAGAGUAUUCCAUU | | AAUGGAAUACUCUUGGUUACAUG | | 625-647 |
| AD-649346 | GUAACCAAGAGUAUUCCAUUU | | AAAUGGAAUACUCUUGGUUACAU | | 626-648 |
| AD-649347 | UAACCAAGAGUAUUCCAUUUU | | AAAAUGGAAUACUCUUGGUUACA | | 627-649 |
| AD-649348 | ACCAAGAGUAUUCCAUUUUUA | | UAAAAATGGAAUACUCUUGGUUA | | 629-651 |
| AD-649349 | CCAAGAGUAUUCCAUUUUUAU | | AUAAAAAUGGAAUACUCUUGGUU | | 630-652 |
| AD-649350 | CAAGAGUAUUCCAUUUUUACU | | AGUAAAAAUGGAAUACUCUUGGU | | 631-653 |
| AD-649351 | AAGAGUAUUCCAUUUUUACUA | | UAGUAAAAAUGGAAUACUCUUGG | | 632-654 |
| AD-649352 | AGAGUAUUCCAUUUUUACUAA | | UUAGUAAAAAUGGAAUACUCUUG | | 633-655 |
| AD-649353 | GAGUAUUCCAUUUUUACUAAA | | UUUAGUAAAAAUGGAAUACUCUU | | 634-656 |
| AD-649354 | AGUAUUCCAUUUUUACUAAAU | | AUUUAGTAAAAAUGGAAUACUCU | | 635-657 |
| AD-649355 | GUAUUCCAUUUUUACUAAAGU | | ACUUUAGUAAAAAUGGAAUACUC | | 636-658 |
| AD-649356 | UAUUCCAUUUUUACUAAAGCA | | UGCUUUAGUAAAAAUGGAAUACU | | 637-659 |
| AD-649357 | AUUCCAUUUUUACUAAAGCAU | | AUGCUUTAGUAAAAAUGGAAUAC | | 638-660 |
| AD-649358 | UUCCAUUUUUACUAAAGCAGU | | ACUGCUTUAGUAAAAAUGGAAUA | | 639-661 |
| AD-649359 | UCCAUUUUUACUAAAGCAGUU | | AACUGCTUUAGUAAAAAUGGAAU | | 640-662 |
| AD-649360 | CCAUUUUUACUAAAGCAGUGU | | ACACUGCUUUAGUAAAAAUGGAA | | 641-663 |
| AD-649361 | CAUUUUUACUAAAGCAGUGUU | | AACACTGCUUUAGUAAAAAUGGA | | 642-664 |
| AD-649362 | AUUUUUACUAAAGCAGUGUUU | | AAACACTGCUUUAGUAAAAAUGG | | 643-665 |
| AD-649363 | UUUUUACUAAAGCAGUGUUUU | | AAAACACUGCUUUAGUAAAAAUG | | 644-666 |
| AD-649364 | UUUUACUAAAGCAGUGUUUUU | | AAAAACACUGCUUUAGUAAAAAU | | 645-667 |
| AD-649365 | UUUACUAAAGCAGUGUUUUCA | | UGAAAACACUGCUUUAGUAAAAA | | 646-668 |
| AD-649366 | UUACUAAAGCAGUGUUUUCAU | | AUGAAAACACUGCUUUAGUAAAA | | 647-669 |
| AD-649367 | UACUAAAGCAGUGUUUUCACU | | AGUGAAAACACUGCUUUAGUAAA | | 648-670 |
| AD-649368 | ACUAAAGCAGUGUUUUCACCU | | AGGUGAAAACACUGCUUUAGUAA | | 649-671 |
| AD-649369 | CUAAAGCAGUGUUUUCACCUU | | AAGGUGAAAACACUGCUUUAGUA | | 650-672 |
| AD-649370 | UAAAGCAGUGUUUUCACCUCA | | UGAGGTGAAAACACUGCUUUAGU | | 651-673 |
| AD-649371 | AAAGCAGUGUUUUCACCUCAU | | AUGAGGTGAAAACACUGCUUUAG | | 652-674 |
| AD-649372 | AAGCAGUGUUUUCACCUCAUA | | UAUGAGGTGAAAACACUGCUUUA | | 653-675 |
| AD-649373 | AGCAGUGUUUUCACCUCAUAU | | AUAUGAGGUGAAAACACUGCUUU | | 654-676 |
| AD-649374 | AGAAGUCCAGGCAGAGACAAU | | AUUGUCTCUGCCUGGACUUCUAA | | 683-705 |
| AD-649375 | GAAGUCCAGGCAGAGACAAUA | | UAUUGUCUCUGCCUGGACUUCUA | | 684-706 |
| AD-649376 | AAGUCCAGGCAGAGACAAUAA | | UUAUUGTCUCUGCCUGGACUUCU | | 685-707 |
| AD-649377 | AGUCCAGGCAGAGACAAUAAA | | UUUAUTGUCUCUGCCUGGACUUC | | 686-708 |
| AD-649378 | GUCCAGGCAGAGACAAUAAAA | | UUUUAUTGUCUCUGCCUGGACUU | | 687-709 |
| AD-649379 | UCCAGGCAGAGACAAUAAAAU | | AUUUUATUGUCUCUGCCUGGACU | | 688-710 |
| AD-649380 | CCAGGCAGAGACAAUAAAACA | | UGUUUUAUUGUCUCUGCCUGGAC | | 689-711 |
| AD-649381 | CAGGCAGAGACAAUAAAACAU | | AUGUUUTAUUGUCUCUGCCUGGA | | 690-712 |
| AD-649382 | AGGCAGAGACAAUAAAACAUU | | AAUGUUTUAUUGUCUCUGCCUGG | | 691-713 |
| AD-649383 | GGCAGAGACAAUAAAACAUUU | | AAAUGUTUUAUUGUCUCUGCCUG | | 692-714 |
| AD-649384 | GCAGAGACAAUAAAACAUUCU | | AGAAUGTUUUAUUGUCUCUGCCU | | 693-715 |
| AD-649385 | AGAGACAAUAAAACAUUCCUU | | AAGGAATGUUUUAUUGUCUCUGC | | 695-717 |
| AD-649386 | GAGACAAUAAAACAUUCCUGU | | ACAGGAAUGUUUUAUUGUCUCUG | | 696-718 |
| AD-649388 | GACAAUAAAACAUUCCUGUGA | | UCACAGGAAUGUUUUAUUGUCUC | | 698-720 |
| AD-649389 | ACAAUAAAACAUUCCUGUGAA | | UUCACAGGAAUGUUUUAUUGUCU | | 699-721 |
| AD-649390 | CAAUAAAACAUUCCUGUGAAA | | UUUCACAGGAAUGUUUUAUUGUC | | 700-722 |
| AD-649391 | AAUAAAACAUUCCUGUGAAAU | | AUUUCACAGGAAUGUUUUAUUGU | | 701-723 |
| AD-649392 | AUAAAACAUUCCUGUGAAAGU | | ACUUUCACAGGAAUGUUUUAUUG | | 702-724 |
| AD-649394 | AAAACAUUCCUGUGAAAGGCA | | UGCCUUTCACAGGAAUGUUUUAU | | 704-726 |
| AD-649395 | AAACAUUCCUGUGAAAGGCAU | | AUGCCUTUCACAGGAAUGUUUUA | | 705-727 |
| AD-649396 | AACAUUCCUGUGAAAGGCACU | | AGUGCCTUUCACAGGAAUGUUUU | | 706-728 |
| AD-649397 | ACAUUCCUGUGAAAGGCACUU | | AAGUGCCUUUCACAGGAAUGUUU | | 707-729 |
| AD-649398 | CAUUCCUGUGAAAGGCACUUU | | AAAGUGCCUUUCACAGGAAUGUU | | 708-730 |
| AD-649399 | AUUCCUGUGAAAGGCACUUUU | | AAAAGTGCCUUUCACAGGAAUGU | | 709-731 |
| AD-649400 | UUCCUGUGAAAGGCACUUUUU | | AAAAAGTGCCUUUCACAGGAAUG | | 710-732 |
| AD-649401 | UCCUGUGAAAGGCACUUUUCA | | UGAAAAGUGCCUUUCACAGGAAU | | 711-733 |
| AD-649402 | CCUGUGAAAGGCACUUUUCAU | | AUGAAAAGUGCCUUUCACAGGAA | | 712-734 |
| AD-649403 | CUGUGAAAGGCACUUUUCAUU | | AAUGAAAAGUGCCUUUCACAGGA | | 713-735 |
| AD-649404 | UGUGAAAGGCACUUUUCAUUU | | AAAUGAAAAGUGCCUUUCACAGG | | 714-736 |
| AD-649405 | GUGAAAGGCACUUUUCAUUCU | | AGAAUGAAAAGUGCCUUUCACAG | | 715-737 |
| AD-649406 | UGAAAGGCACUUUUCAUUCCA | | UGGAATGAAAAGUGCCUUUCACA | | 716-738 |
| AD-649407 | GAAAGGCACUUUUCAUUCCAU | | AUGGAATGAAAAGUGCCUUUCAC | | 717-739 |
| AD-68315 | UGUAACCAAGAGUAUUCCAUU | | AAUGGAAUACUCUUGGUUACAUG | | 625-647 |
| AD-68316 | AACCAAGAGUAUUCCAUUUUU | | AAAAAUGGAAUACUCUUGGUUAC | | 628-650 |
| AD-68317 | CAGAGACAAUAAAACAUUCCU | | AGGAAUGUUUUAUUGUCUCUGCC | | 694-716 |
| AD-68318 | UUUUUACUAAAGCAGUGUUUU | | AAAACACUGCUUUAGUAAAAAUG | | 644-666 |
| AD-68326 | UUUCAUGUAACCAAGAGUAUU | | AAUACUCUUGGUUACAUGAAAUC | | 620-642 |
| AD-68327 | CAAUAAAACAUUCCUGUGAAA | | UUUCACAGGAAUGUUUUAUUGUC | | 700-722 |
| AD- | AACCAAGAGUAUUCCAUUUUU | | AAAAATGGAAUACUCUUGGUUAC | | 628-650 |
| 157442.5 | | | | | |
| AD- | CAGAGACAAUAAAACAUUCCU | | AGGAATGUUUUAUUGUCUCUGCC | | 694-716 |
| 157470.8 | | | | | |
| AD-65480 | UGGGAUUUCAUGUAACCAAGA | | UCUUGGUUACAUGAAAUCCCAUC | | 505-527 |

TABLE 3
Modified Sense and Antisense Strand Sequences of TTR dsRNA Agents

| | | SEQ | | SEQ | | SEQ |
|---|---|---|---|---|---|---|
| Duplex | | ID | | ID | | ID |
| Name | Sense Sequence 5′ to 3′ | NO: | Antisense Sequence 5′ to 3′ | NO: | mRNA Target Sequence | NO: |
| AD- | csusgaagGfaCfGfAfgggaugggauL96 | | asUfscccAfucccucgUfcCfuucagsgsu | | ACCUGAAGGACGAGGGAUGGGAU | |
| 649237 | | | | | | |
| AD- | usgsaaggAfcGfAfGfggaugggauuL96 | | asAfsuccCfaucccucGfuCfcuucasgsg | | CCUGAAGGACGAGGGAUGGGAUU | |
| 649238 | | | | | | |
| AD- | gsasaggaCfgAfGfGfgaugggauuuL96 | | asAfsaucCfcaucccuCfgUfccuucsasg | | CUGAAGGACGAGGGAUGGGAUUU | |
| 649239 | | | | | | |
| AD- | asasggacGfaGfGfGfaugggauuuuL96 | | asAfsaauCfccaucccUfcGfuccuuscsa | | UGAAGGACGAGGGAUGGGAUUUC | |
| 649240 | | | | | | |
| AD- | asgsgacgAfgGfGfAfugggauuucaL96 | | usGfsaaaUfcccauccCfuCfguccususc | | GAAGGACGAGGGAUGGGAUUUCA | |
| 649241 | | | | | | |
| AD- | gsgsacgaGfgGfAfUfgggauuucauL96 | | asUfsgaaAfucccaucCfcUfcguccsusu | | AAGGACGAGGGAUGGGAUUUCAU | |
| 649242 | | | | | | |
| AD- | gsascgagGfgAfUfGfggauuucauuL96 | | asAfsugaAfaucccauCfcCfucgucscsu | | AGGACGAGGGAUGGGAUUUCAUG | |
| 649243 | | | | | | |
| AD- | ascsgaggGfaUfGfGfgauuucauguL96 | | asCfsaugAfaaucccaUfcCfcucguscsc | | GGACGAGGGAUGGGAUUUCAUGU | |
| 649244 | | | | | | |
| AD- | csgsagggAfuGfGfGfauuucauguaL96 | | usAfscauGfaaaucccAfuCfccucgsusc | | GACGAGGGAUGGGAUUUCAUGUA | |
| 649245 | | | | | | |
| AD- | gsasgggaUfgGfGfAfuuucauguaaL96 | | usUfsacaUfgaaauccCfaUfcccucsgsu | | ACGAGGGAUGGGAUUUCAUGUAA | |
| 649246 | | | | | | |
| AD- | asgsggauGfgGfAfUfuucauguaauL96 | | asUfsuacAfugaaaucCfcAfucccuscsg | | CGAGGGAUGGGAUUUCAUGUAAC | |
| 649247 | | | | | | |
| AD- | gsgsgaugGfgAfUfUfucauguaacuL96 | | asGfsuuaCfaugaaauCfcCfaucccsusc | | GAGGGAUGGGAUUUCAUGUAACC | |
| 649248 | | | | | | |
| AD- | gsgsauggGfaUfUfUfcauguaaccaL96 | | usGfsguuAfcaugaaaUfcCfcauccscsu | | AGGGAUGGGAUUUCAUGUAACCA | |
| 649249 | | | | | | |
| AD- | gsasugggAfuUfUfCfauguaaccaaL96 | | usUfsgguUfacaugaaAfuCfccaucscsc | | GGGAUGGGAUUUCAUGUAACCAA | |
| 649250 | | | | | | |
| AD- | asusgggaUfuUfCfAfuguaaccaauL96 | | asUfsuggUfuacaugaAfaUfcccauscsc | | GGAUGGGAUUUCAUGUAACCAAG | |
| 649251 | | | | | | |
| AD- | gsgsgauuUfcAfUfGfuaaccaagauL96 | | asUfscuuGfguuacauGfaAfaucccsasu | | AUGGGAUUUCAUGUAACCAAGAG | |
| 649252 | | | | | | |
| AD- | gsgsauuuCfaUfGfUfaaccaagaguL96 | | asCfsucuUfgguuacaUfgAfaauccscsa | | UGGGAUUUCAUGUAACCAAGAGU | |
| 649253 | | | | | | |
| AD- | gsasuuucAfuGfUfAfaccaagaguaL96 | | usAfscucUfugguuacAfuGfaaaucscsc | | GGGAUUUCAUGUAACCAAGAGUA | |
| 649254 | | | | | | |
| AD- | asusuucaUfgUfAfAfccaagaguauL96 | | asUfsacuCfuugguuaCfaUfgaaauscsc | | GGAUUUCAUGUAACCAAGAGUAU | |
| 649255 | | | | | | |
| AD- | ususcaugUfaAfCfCfaagaguauuuL96 | | asAfsauaCfucuugguUfaCfaugaasasu | | AUUUCAUGUAACCAAGAGUAUUC | |
| 649256 | | | | | | |
| AD- | csasuguaAfcCfAfAfgaguauuccaL96 | | usGfsgaaUfacucuugGfuUfacaugsasa | | UUCAUGUAACCAAGAGUAUUCCA | |
| 649258 | | | | | | |
| AD- | asusguaaCfcAfAfGfaguauuccauL96 | | asUfsggaAfuacucuuGfgUfuacausgs | | UCAUGUAACCAAGAGUAUUCCAU | |
| 649259 | | | a | | | |
| AD- | gsusaaccAfaGfAfGfuauuccauuuL96 | | asAfsaugGfaauacucUfuGfguuacsasu | | AUGUAACCAAGAGUAUUCCAUUU | |
| 649260 | | | | | | |
| AD- | usasaccaAfgAfGfUfauuccauuuuL96 | | asAfsaauGfgaauacuCfuUfgguuascsa | | UGUAACCAAGAGUAUUCCAUUUU | |
| 649261 | | | | | | |
| AD- | ascscaagAfgUfAfUfuccauuuuuaL96 | | usAfsaaaAfuggaauaCfuCfuuggusus | | UAACCAAGAGUAUUCCAUUUUUA | |
| 649262 | | | a | | | |
| AD- | cscsaagaGfuAfUfUfccauuuuuauL96 | | asUfsaaaAfauggaauAfcUfcuuggsus | | AACCAAGAGUAUUCCAUUUUUAC | |
| 649263 | | | u | | | |
| AD- | csasagagUfaUfUfCfcauuuuuacuL96 | | asGfsuaaAfaauggaaUfaCfucuugsgsu | | ACCAAGAGUAUUCCAUUUUUACU | |
| 649264 | | | | | | |
| AD- | asasgaguAfuUfCfCfauuuuuacuaL96 | | usAfsguaAfaaauggaAfuAfcucuusgs | | CCAAGAGUAUUCCAUUUUUACUA | |
| 649265 | | | g | | | |
| AD- | asgsaguaUfuCfCfAfuuuuuacuaaL96 | | usUfsaguAfaaaauggAfaUfacucusus | | CAAGAGUAUUCCAUUUUUACUAA | |
| 649266 | | | g | | | |
| AD- | gsasguauUfcCfAfUfuuuuacuaaaL96 | | usUfsuagUfaaaaaugGfaAfuacucsusu | | AAGAGUAUUCCAUUUUUACUAAA | |
| 649267 | | | | | | |
| AD- | asgsuauuCfcAfUfUfuuuacuaaauL96 | | asUfsuuaGfuaaaaauGfgAfauacuscsu | | AGAGUAUUCCAUUUUUACUAAAG | |
| 649268 | | | | | | |
| AD- | gsusauucCfaUfUfUfuuacuaaaguL96 | | asCfsuuuAfguaaaaaUfgGfaauacsusc | | GAGUAUUCCAUUUUUACUAAAGC | |
| 649269 | | | | | | |
| AD- | usasuuccAfuUfUfUfuacuaaagcaL96 | | usGfscuuUfaguaaaaAfuGfgaauascsu | | AGUAUUCCAUUUUUACUAAAGCA | |
| 649270 | | | | | | |
| AD- | asusuccaUfuUfUfUfacuaaagcauL96 | | asUfsgcuUfuaguaaaAfaUfggaausasc | | GUAUUCCAUUUUUACUAAAGCAG | |
| 649271 | | | | | | |
| AD- | ususccauUfuUfUfAfcuaaagcaguL96 | | asCfsugcUfuuaguaaAfaAfuggaasusa | | UAUUCCAUUUUUACUAAAGCAGU | |
| 649272 | | | | | | |
| AD- | cscsauuuUfuAfCfUfaaagcaguguL96 | | asCfsacuGfcuuuaguAfaAfaauggsasa | | UUCCAUUUUUACUAAAGCAGUGU | |
| 649274 | | | | | | |
| AD- | csasuuuuUfaCfUfAfaagcaguguuL96 | | asAfscacUfgcuuuagUfaAfaaaugsgsa | | UCCAUUUUUACUAAAGCAGUGUU | |
| 649275 | | | | | | |
| AD- | asusuuuuAfcUfAfAfagcaguguuuL96 | | asAfsacaCfugcuuuaGfuAfaaaausgsg | | CCAUUUUUACUAAAGCAGUGUUU | |
| 649276 | | | | | | |
| AD- | ususuuacUfaAfAfGfcaguguuuuuL96 | | asAfsaaaCfacugcuuUfaGfuaaaasasu | | AUUUUUACUAAAGCAGUGUUUUC | |
| 649277 | | | | | | |
| AD- | ususuacuAfaAfGfCfaguguuuucaL96 | | usGfsaaaAfcacugcuUfuAfguaaasasa | | UUUUUACUAAAGCAGUGUUUUCA | |
| 649278 | | | | | | |
| AD- | ususacuaAfaGfCfAfguguuuucauL96 | | asUfsgaaAfacacugcUfuUfaguaasasa | | UUUUACUAAAGCAGUGUUUUCAC | |
| 649279 | | | | | | |
| AD- | usascuaaAfgCfAfGfuguuuucacuL96 | | asGfsugaAfaacacugCfuUfuaguasasa | | UUUACUAAAGCAGUGUUUUCACC | |
| 649280 | | | | | | |
| AD- | ascsuaaaGfcAfGfUfguuuucaccuL96 | | asGfsgugAfaaacacuGfcUfuuagusasa | | UUACUAAAGCAGUGUUUUCACCU | |
| 649281 | | | | | | |
| AD- | csusaaagCfaGfUfGfuuuucaccuuL96 | | asAfsgguGfaaaacacUfgCfuuuagsusa | | UACUAAAGCAGUGUUUUCACCUC | |
| 649282 | | | | | | |
| AD- | usasaagcAfgUfGfUfuuucaccucaL96 | | usGfsaggUfgaaaacaCfuGfcuuuasgsu | | ACUAAAGCAGUGUUUUCACCUCA | |
| 649283 | | | | | | |
| AD- | asasagcaGfuGfUfUfuucaccucauL96 | | asUfsgagGfugaaaacAfcUfgcuuusasg | | CUAAAGCAGUGUUUUCACCUCAU | |
| 649284 | | | | | | |
| AD- | asasgcagUfgUfUfUfucaccucauaL96 | | usAfsugaGfgugaaaaCfaCfugcuususa | | UAAAGCAGUGUUUUCACCUCAUA | |
| 649285 | | | | | | |
| AD- | asgscaguGfuUfUfUfcaccucauauL96 | | asUfsaugAfggugaaaAfcAfcugcusus | | AAAGCAGUGUUUUCACCUCAUAU | |
| 649286 | | | u | | | |
| AD- | asgsaaguCfcAfGfGfcagagacaauL96 | | asUfsuguCfucugccuGfgAfcuucusas | | UUAGAAGUCCAGGCAGAGACAAU | |
| 649287 | | | a | | | |
| AD- | gsasagucCfaGfGfCfagagacaauaL96 | | usAfsuugUfcucugccUfgGfacuucsus | | UAGAAGUCCAGGCAGAGACAAUA | |
| 649288 | | | a | | | |
| AD- | asgsuccaGfgCfAfGfagacaauaaaL96 | | usUfsuauUfgucucugCfcUfggacusus | | GAAGUCCAGGCAGAGACAAUAAA | |
| 649290 | | | c | | | |
| AD- | gsusccagGfcAfGfAfgacaauaaaaL96 | | usUfsuuaUfugucucuGfcCfuggacsus | | AAGUCCAGGCAGAGACAAUAAAA | |
| 649291 | | | u | | | |
| AD- | uscscaggCfaGfAfGfacaauaaaauL96 | | asUfsuuuAfuugucucUfgCfcuggascs | | AGUCCAGGCAGAGACAAUAAAAC | |
| 649292 | | | u | | | |
| AD- | cscsaggcAfgAfGfAfcaauaaaacaL96 | | usGfsuuuUfauugucuCfuGfccuggsas | | GUCCAGGCAGAGACAAUAAAACA | |
| 649293 | | | c | | | |
| AD- | csasggcaGfaGfAfCfaauaaaacauL96 | | asUfsguuUfuauugucUfcUfgccugsgs | | UCCAGGCAGAGACAAUAAAACAU | |
| 649294 | | | a | | | |
| AD- | asgsgcagAfgAfCfAfauaaaacauuL96 | | asAfsuguUfuuauuguCfuCfugccusgs | | CCAGGCAGAGACAAUAAAACAUU | |
| 649295 | | | g | | | |
| AD- | gsgscagaGfaCfAfAfuaaaacauuuL96 | | asAfsaugUfuuuauugUfcUfcugccsus | | CAGGCAGAGACAAUAAAACAUUC | |
| 649296 | | | g | | | |
| AD- | gscsagagAfcAfAfUfaaaacauucuL96 | | asGfsaauGfuuuuauuGfuCfucugcscs | | AGGCAGAGACAAUAAAACAUUCC | |
| 649297 | | | u | | | |
| AD- | asgsagacAfaUfAfAfaacauuccuuL96 | | asAfsggaAfuguuuuaUfuGfucucusgs | | GCAGAGACAAUAAAACAUUCCUG | |
| 649298 | | | c | | | |
| AD- | gsasgacaAfuAfAfAfacauuccuguL96 | | asCfsaggAfauguuuuAfuUfgucucsus | | CAGAGACAAUAAAACAUUCCUGU | |
| 649299 | | | g | | | |
| AD- | asgsacaaUfaAfAfAfcauuccuguuL96 | | asAfscagGfaauguuuUfaUfugucuscs | | AGAGACAAUAAAACAUUCCUGUG | |
| 649300 | | | u | | | |
| AD- | gsascaauAfaAfAfCfauuccugugaL96 | | usCfsacaGfgaauguuUfuAfuugucsus | | GAGACAAUAAAACAUUCCUGUGA | |
| 649301 | | | c | | | |
| AD- | ascsaauaAfaAfCfAfuuccugugaaL96 | | usUfscacAfggaauguUfuUfauuguscs | | AGACAAUAAAACAUUCCUGUGAA | |
| 649302 | | | u | | | |
| AD- | asasuaaaAfcAfUfUfccugugaaauL96 | | asUfsuucAfcaggaauGfuUfuuauusgs | | ACAAUAAAACAUUCCUGUGAAAG | |
| 649303 | | | u | | | |
| AD- | asusaaaaCfaUfUfCfcugugaaaguL96 | | asCfsuuuCfacaggaaUfgUfuuuausus | | CAAUAAAACAUUCCUGUGAAAGG | |
| 649304 | | | g | | | |
| AD- | usasaaacAfuUfCfCfugugaaagguL96 | | asCfscuuUfcacaggaAfuGfuuuuasus | | AAUAAAACAUUCCUGUGAAAGGC | |
| 649305 | | | u | | | |
| AD- | asasaacaUfuCfCfUfgugaaaggcaL96 | | usGfsccuUfucacaggAfaUfguuuusas | | AUAAAACAUUCCUGUGAAAGGCA | |
| 649306 | | | u | | | |
| AD- | asasacauUfcCfUfGfugaaaggcauL96 | | asUfsgccUfuucacagGfaAfuguuusus | | UAAAACAUUCCUGUGAAAGGCAC | |
| 649307 | | | a | | | |
| AD- | asascauuCfcUfGfUfgaaaggcacuL96 | | asGfsugcCfuuucacaGfgAfauguusus | | AAAACAUUCCUGUGAAAGGCACU | |
| 649308 | | | u | | | |
| AD- | ascsauucCfuGfUfGfaaaggcacuuL96 | | asAfsgugCfcuuucacAfgGfaaugusus | | AAACAUUCCUGUGAAAGGCACUU | |
| 649309 | | | u | | | |
| AD- | csasuuccUfgUfGfAfaaggcacuuuL96 | | asAfsaguGfccuuucaCfaGfgaaugsusu | | AACAUUCCUGUGAAAGGCACUUU | |
| 649310 | | | | | | |
| AD- | asusuccuGfuGfAfAfaggcacuuuuL96 | | asAfsaagUfgccuuucAfcAfggaausgs | | ACAUUCCUGUGAAAGGCACUUUU | |
| 649311 | | | u | | | |
| AD- | ususccugUfgAfAfAfggcacuuuuuL96 | | asAfsaaaGfugccuuuCfaCfaggaasusg | | CAUUCCUGUGAAAGGCACUUUUC | |
| 649312 | | | | | | |
| AD- | uscscuguGfaAfAfGfgcacuuuucaL96 | | usGfsaaaAfgugccuuUfcAfcaggasasu | | AUUCCUGUGAAAGGCACUUUUCA | |
| 649313 | | | | | | |
| AD- | cscsugugAfaAfGfGfcacuuuucauL96 | | asUfsgaaAfagugccuUfuCfacaggsasa | | UUCCUGUGAAAGGCACUUUUCAU | |
| 649314 | | | | | | |
| AD- | csusgugaAfaGfGfCfacuuuucauuL96 | | asAfsugaAfaagugccUfuUfcacagsgsa | | UCCUGUGAAAGGCACUUUUCAUU | |
| 649315 | | | | | | |
| AD- | usgsugaaAfgGfCfAfcuuuucauuuL96 | | asAfsaugAfaaagugcCfuUfucacasgsg | | CCUGUGAAAGGCACUUUUCAUUC | |
| 649316 | | | | | | |
| AD- | usgsaaagGfcAfCfUfuuucauuccaL96 | | usGfsgaaUfgaaaaguGfcCfuuucascsa | | UGUGAAAGGCACUUUUCAUUCCA | |
| 649318 | | | | | | |
| AD- | gsasaaggCfaCfUfUfuucauuccauL96 | | asUfsggaAfugaaaagUfgCfcuuucsasc | | GUGAAAGGCACUUUUCAUUCCAC | |
| 649319 | | | | | | |
| AD- | csusgaagGfaCfGfAfgggaugggauL96 | | asUfscccAf(Tgn)cccucgUfcCfuucag | | ACCUGAAGGACGAGGGAUGGGAU | |
| 649320 | | | sgsu | | | |
| AD- | usgsaaggAfcGfAfGfggaugggauuL96 | | asAfsuccCf(Agn)ucccucGfuCfcuuca | | CCUGAAGGACGAGGGAUGGGAUU | |
| 649321 | | | sgsg | | | |
| AD- | gsasaggaCfgAfGfGfgaugggauuuL96 | | asAfsaucCf(Cgn)aucccuCfgUfccuuc | | CUGAAGGACGAGGGAUGGGAUUU | |
| 649322 | | | sasg | | | |
| AD- | asasggacGfaGfGfGfaugggauuuuL96 | | asAfsaauCf(Cgn)caucccUfcGfuccuu | | UGAAGGACGAGGGAUGGGAUUUC | |
| 649323 | | | scsa | | | |
| AD- | asgsgacgAfgGfGfAfugggauuucaL96 | | usGfsaaaUf(Cgn)ccauccCfuCfguccu | | GAAGGACGAGGGAUGGGAUUUCA | |
| 649324 | | | susc | | | |
| AD- | gsgsacgaGfgGfAfUfgggauuucauL96 | | asUfsgaaAf(Tgn)cccaucCfcUfcgucc | | AAGGACGAGGGAUGGGAUUUCAU | |
| 649325 | | | SUSU | | | |
| AD- | gsascgagGfgAfUfGfggauuucauuL96 | | asAfsugaAf(Agn)ucccauCfcCfucgu | | AGGACGAGGGAUGGGAUUUCAUG | |
| 649326 | | | cscsu | | | |
| AD- | ascsgaggGfaUfGfGfgauuucauguL96 | | asCfsaugAf(Agn)aucccaUfcCfcucgu | | GGACGAGGGAUGGGAUUUCAUGU | |
| 649327 | | | SCSC | | | |
| AD- | csgsagggAfuGfGfGfauuucauguaL96 | | usAfscauGf(Agn)aaucccAfuCfccuc | | GACGAGGGAUGGGAUUUCAUGUA | |
| 649328 | | | gsusc | | | |
| AD- | gsasgggaUfgGfGfAfuuucauguaaL96 | | usUfsaca(Tgn)gaaauccCfaUfcccucs | | ACGAGGGAUGGGAUUUCAUGUAA | |
| 649329 | | | gsu | | | |
| AD- | asgsggauGfgGfAfUfuucauguaauL96 | | asUfsuacAf(Tgn)gaaaucCfcAfucccu | | CGAGGGAUGGGAUUUCAUGUAAC | |
| 649330 | | | scsg | | | |
| AD- | gsgsgaugGfgAfUfUfucauguaacuL96 | | asGfsuuaCf(Agn)ugaaauCfcCfauccc | | GAGGGAUGGGAUUUCAUGUAACC | |
| 649331 | | | susc | | | |
| AD- | gsgsauggGfaUfUfUfcauguaaccaL96 | | usGfsguuAf(Cgn)augaaaUfcCfcauc | | AGGGAUGGGAUUUCAUGUAACCA | |
| 649332 | | | cscsu | | | |
| AD- | gsasugggAfuUfUfCfauguaaccaaL96 | | usUfsgguUf(Agn)caugaaAfuCfccau | | GGGAUGGGAUUUCAUGUAACCAA | |
| 649333 | | | cscsc | | | |
| AD- | asusgggaUfuUfCfAfuguaaccaauL96 | | asUfsuggUf(Tgn)acaugaAfaUfcccau | | GGAUGGGAUUUCAUGUAACCAAG | |
| 649334 | | | SCSC | | | |
| AD- | usgsggauUfuCfAfUfguaaccaagaL96 | | usCfsuugGf(Tgn)uacaugAfaAfuccc | | GAUGGGAUUUCAUGUAACCAAGA | |
| 649335 | | | asusc | | | |
| AD- | gsgsgauuUfcAfUfGfuaaccaagauL96 | | asUfscuuGfg(Tgn)uacauGfaAfauccc | | AUGGGAUUUCAUGUAACCAAGAG | |
| 649336 | | | sasu | | | |
| AD- | gsgsauuuCfaUfGfUfaaccaagaguL96 | | asCfsucu(Tgn)gguuacaUfgAfaauccs | | UGGGAUUUCAUGUAACCAAGAGU | |
| 649337 | | | csa | | | |
| AD- | gsasuuucAfuGfUfAfaccaagaguaL96 | | usAfscucUf(Tgn)gguuacAfuGfaaau | | GGGAUUUCAUGUAACCAAGAGUA | |
| 649338 | | | CSCSC | | | |
| AD- | asusuucaUfgUfAfAfccaagaguauL96 | | asUfsacuCf(Tgn)ugguuaCfaUfgaaau | | GGAUUUCAUGUAACCAAGAGUAU | |
| 649339 | | | scsc | | | |
| AD- | ususucauGfuAfAfCfcaagaguauuL96 | | asAfsuacUf(Cgn)uugguuAfcAfugaa | | GAUUUCAUGUAACCAAGAGUAUU | |
| 649340 | | | asusc | | | |
| AD- | ususcaugUfaAfCfCfaagaguauuuL96 | | asAfsauaCf(Tgn)cuugguUfaCfaugaa | | AUUUCAUGUAACCAAGAGUAUUC | |
| 649341 | | | sasu | | | |
| AD- | usesauguAfaCfCfAfagaguauucuL96 | | asGfsaauAf(Cgn)ucuuggUfuAfcaug | | UUUCAUGUAACCAAGAGUAUUCC | |
| 649342 | | | asasa | | | |
| AD- | csasuguaAfcCfAfAfgaguauuccaL96 | | usGfsgaaUf(Agn)cucuugGfuUfacau | | UUCAUGUAACCAAGAGUAUUCCA | |
| 649343 | | | gsasa | | | |
| AD- | asusguaaCfcAfAfGfaguauuccauL96 | | asUfsggaAf(Tgn)acucuuGfgUfuaca | | UCAUGUAACCAAGAGUAUUCCAU | |
| 649344 | | | usgsa | | | |
| AD- | usgsuaacCfaAfGfAfguauuccauuL96 | | asAfsuggAf(Agn)uacucuUfgGfuuac | | CAUGUAACCAAGAGUAUUCCAUU | |
| 649345 | | | asusg | | | |
| AD- | gsusaaccAfaGfAfGfuauuccauuuL96 | | asAfsaugGf(Agn)auacucUfuGfguua | | AUGUAACCAAGAGUAUUCCAUUU | |
| 649346 | | | csasu | | | |
| AD- | usasaccaAfgAfGfUfauuccauuuuL96 | | asAfsaauGfg(Agn)auacuCfuUfgguu | | UGUAACCAAGAGUAUUCCAUUUU | |
| 649347 | | | ascsa | | | |
| AD- | ascscaagAfgUfAfUfuccauuuuuaL96 | | usAfsaaaAf(Tgn)ggaauaCfuCfuugg | | UAACCAAGAGUAUUCCAUUUUUA | |
| 649348 | | | ususa | | | |
| AD- | cscsaagaGfuAfUfUfccauuuuuauL96 | | asUfsaaaAf(Agn)uggaauAfcUfcuug | | AACCAAGAGUAUUCCAUUUUUAC | |
| 649349 | | | gsusu | | | |
| AD- | csasagagUfaUfUfCfcauuuuuacuL96 | | asGfsuaaAf(Agn)auggaaUfaCfucuu | | ACCAAGAGUAUUCCAUUUUUACU | |
| 649350 | | | gsgsu | | | |
| AD- | asasgaguAfuUfCfCfauuuuuacuaL96 | | usAfsguaAf(Agn)aauggaAfuAfcucu | | CCAAGAGUAUUCCAUUUUUACUA | |
| 649351 | | | usgsg | | | |
| AD- | asgsaguaUfuCfCfAfuuuuuacuaaL96 | | usUfsaguAf(Agn)aaauggAfaUfacuc | | CAAGAGUAUUCCAUUUUUACUAA | |
| 649352 | | | ususg | | | |
| AD- | gsasguauUfcCfAfUfuuuuacuaaaL96 | | usUfsuagUf(Agn)aaaaugGfaAfuacu | | AAGAGUAUUCCAUUUUUACUAAA | |
| 649353 | | | csusu | | | |
| AD- | asgsuauuCfcAfUfUfuuuacuaaauL96 | | asUfsuuaGf(Tgn)aaaaauGfgAfauacu | | AGAGUAUUCCAUUUUUACUAAAG | |
| 649354 | | | SCSU | | | |
| AD- | gsusauucCfaUfUfUfuuacuaaaguL96 | | asCfsuuu(Agn)guaaaaaUfgGfaauacs | | GAGUAUUCCAUUUUUACUAAAGC | |
| 649355 | | | use | | | |
| AD- | usasuuccAfuUfUfUfuacuaaagcaL96 | | usGfscuuUf(Agn)guaaaaAfuGfgaau | | AGUAUUCCAUUUUUACUAAAGCA | |
| 649356 | | | ascsu | | | |
| AD- | asusuccaUfuUfUfUfacuaaagcauL96 | | asUfsgcuUf(Tgn)aguaaaAfaUfggaa | | GUAUUCCAUUUUUACUAAAGCAG | |
| 649357 | | | usasc | | | |
| AD- | ususccauUfuUfUfAfcuaaagcaguL96 | | asCfsugcUf(Tgn)uaguaaAfaAfugga | | UAUUCCAUUUUUACUAAAGCAGU | |
| 649358 | | | asusa | | | |
| AD- | uscscauuUfuUfAfCfuaaagcaguuL96 | | asAfscugCf(Tgn)uuaguaAfaAfaugg | | AUUCCAUUUUUACUAAAGCAGUG | |
| 649359 | | | asasu | | | |
| AD- | cscsauuuUfuAfCfUfaaagcaguguL96 | | asCfsacuGf(Cgn)uuuaguAfaAfaaug | | UUCCAUUUUUACUAAAGCAGUGU | |
| 649360 | | | gsasa | | | |
| AD- | csasuuuuUfaCfUfAfaagcaguguuL96 | | asAfscac(Tgn)gcuuuagUfaAfaaaugs | | UCCAUUUUUACUAAAGCAGUGUU | |
| 649361 | | | gsa | | | |
| AD- | asusuuuuAfcUfAfAfagcaguguuuL96 | | asAfsacaCf(Tgn)gcuuuaGfuAfaaaau | | CCAUUUUUACUAAAGCAGUGUUU | |
| 649362 | | | sgsg | | | |
| AD- | ususuuuaCfuAfAfAfgcaguguuuuL96 | | asAfsaacAf(Cgn)ugcuuuAfgUfaaaa | | CAUUUUUACUAAAGCAGUGUUUU | |
| 649363 | | | asusg | | | |
| AD- | ususuuacUfaAfAfGfcaguguuuuuL96 | | asAfsaaaCf(Agn)cugcuuUfaGfuaaaa | | AUUUUUACUAAAGCAGUGUUUUC | |
| 649364 | | | sasu | | | |
| AD- | ususuacuAfaAfGfCfaguguuuucaL96 | | usGfsaaaAf(Cgn)acugcuUfuAfguaa | | UUUUUACUAAAGCAGUGUUUUCA | |
| 649365 | | | asasa | | | |
| AD- | ususacuaAfaGfCfAfguguuuucauL96 | | asUfsgaaAf(Agn)cacugcUfuUfagua | | UUUUACUAAAGCAGUGUUUUCAC | |
| 649366 | | | asasa | | | |
| AD- | usascuaaAfgCfAfGfuguuuucacuL96 | | asGfsugaAf(Agn)acacugCfuUfuagu | | UUUACUAAAGCAGUGUUUUCACC | |
| 649367 | | | asasa | | | |
| AD- | ascsuaaaGfcAfGfUfguuuucaccuL96 | | asGfsgugAf(Agn)aacacuGfcUfuuag | | UUACUAAAGCAGUGUUUUCACCU | |
| 649368 | | | usasa | | | |
| AD- | csusaaagCfaGfUfGfuuuucaccuuL96 | | asAfsgguGf(Agn)aaacacUfgCfuuua | | UACUAAAGCAGUGUUUUCACCUC | |
| 649369 | | | gsusa | | | |
| AD- | usasaagcAfgUfGfUfuuucaccucaL96 | | usGfsagg(Tgn)gaaaacaCfuGfcuuuas | | ACUAAAGCAGUGUUUUCACCUCA | |
| 649370 | | | gsu | | | |
| AD- | asasagcaGfuGfUfUfuucaccucauL96 | | asUfsgagGf(Tgn)gaaaacAfcUfgcuu | | CUAAAGCAGUGUUUUCACCUCAU | |
| 649371 | | | usasg | | | |
| AD- | asasgcagUfgUfUfUfucaccucauaL96 | | usAfsugaGfg(Tgn)gaaaaCfaCfugcu | | UAAAGCAGUGUUUUCACCUCAUA | |
| 649372 | | | ususa | | | |
| AD- | asgscaguGfuUfUfUfcaccucauauL96 | | asUfsaug(Agn)ggugaaaAfcAfcugcu | | AAAGCAGUGUUUUCACCUCAUAU | |
| 649373 | | | SUSU | | | |
| AD- | asgsaaguCfcAfGfGfcagagacaauL96 | | asUfsuguCf(Tgn)cugccuGfgAfcuuc | | UUAGAAGUCCAGGCAGAGACAAU | |
| 649374 | | | usasa | | | |
| AD- | gsasagucCfaGfGfCfagagacaauaL96 | | usAfsuugUf(Cgn)ucugccUfgGfacuu | | UAGAAGUCCAGGCAGAGACAAUA | |
| 649375 | | | csusa | | | |
| AD- | asasguccAfgGfCfAfgagacaauaaL96 | | usUfsauuGf(Tgn)cucugcCfuGfgacu | | AGAAGUCCAGGCAGAGACAAUAA | |
| 649376 | | | uscsu | | | |
| AD- | asgsuccaGfgCfAfGfagacaauaaaL96 | | usUfsuau(Tgn)gucucugCfcUfggacus | | GAAGUCCAGGCAGAGACAAUAAA | |
| 649377 | | | use | | | |
| AD- | gsusccagGfcAfGfAfgacaauaaaaL96 | | usUfsuuaUf(Tgn)gucucuGfcCfugga | | AAGUCCAGGCAGAGACAAUAAAA | |
| 649378 | | | esusu | | | |
| AD- | uscscaggCfaGfAfGfacaauaaaauL96 | | asUfsuuuAf(Tgn)ugucucUfgCfcugg | | AGUCCAGGCAGAGACAAUAAAAC | |
| 649379 | | | asesu | | | |
| AD- | cscsaggcAfgAfGfAfcaauaaaacaL96 | | usGfsuuuUf(Agn)uugucuCfuGfccug | | GUCCAGGCAGAGACAAUAAAACA | |
| 649380 | | | gsasc | | | |
| AD- | csasggcaGfaGfAfCfaauaaaacauL96 | | asUfsguuUf(Tgn)auugucUfcUfgccu | | UCCAGGCAGAGACAAUAAAACAU | |
| 649381 | | | gsgsa | | | |
| AD- | asgsgcagAfgAfCfAfauaaaacauuL96 | | asAfsuguUf(Tgn)uauuguCfuCfugcc | | CCAGGCAGAGACAAUAAAACAUU | |
| 649382 | | | usgsg | | | |
| AD- | gsgscagaGfaCfAfAfuaaaacauuuL96 | | asAfsaugUf(Tgn)uuauugUfcUfcugc | | CAGGCAGAGACAAUAAAACAUUC | |
| 649383 | | | esusg | | | |
| AD- | gscsagagAfcAfAfUfaaaacauucuL96 | | asGfsaauGf(Tgn)uuuauuGfuCfucug | | AGGCAGAGACAAUAAAACAUUCC | |
| 649384 | | | CSCSU | | | |
| AD- | asgsagacAfaUfAfAfaacauuccuuL96 | | asAfsggaAf(Tgn)guuuuaUfuGfucuc | | GCAGAGACAAUAAAACAUUCCUG | |
| 649385 | | | usgsc | | | |
| AD- | gsasgacaAfuAfAfAfacauuccuguL96 | | asCfsaggAf(Agn)uguuuuAfuUfgucu | | CAGAGACAAUAAAACAUUCCUGU | |
| 649386 | | | csusg | | | |
| AD- | gsascaauAfaAfAfCfauuccugugaL96 | | usCfsacaGfg(Agn)auguuUfuAfuugu | | GAGACAAUAAAACAUUCCUGUGA | |
| 649388 | | | csusc | | | |
| AD- | ascsaauaAfaAfCfAfuuccugugaaL96 | | usUfscac(Agn)ggaauguUfuUfauugu | | AGACAAUAAAACAUUCCUGUGAA | |
| 649389 | | | scsu | | | |
| AD- | csasauaaAfaCfAfUfuccugugaaaL96 | | usUfsucaCf(Agn)ggaaugUfuUfuauu | | GACAAUAAAACAUUCCUGUGAAA | |
| 649390 | | | gsusc | | | |
| AD- | asasuaaaAfcAfUfUfccugugaaauL96 | | asUfsuucAf(Cgn)aggaauGfuUfuuau | | ACAAUAAAACAUUCCUGUGAAAG | |
| 649391 | | | usgsu | | | |
| AD- | asusaaaaCfaUfUfCfcugugaaaguL96 | | asCfsuuuCf(Agn)caggaaUfgUfuuua | | CAAUAAAACAUUCCUGUGAAAGG | |
| 649392 | | | ususg | | | |
| AD- | asasaacaUfuCfCfUfgugaaaggcaL96 | | usGfsccuUf(Tgn)cacaggAfaUfguuu | | AUAAAACAUUCCUGUGAAAGGCA | |
| 649394 | | | usasu | | | |
| AD- | asasacauUfcCfUfGfugaaaggcauL96 | | asUfsgccUf(Tgn)ucacagGfaAfuguu | | UAAAACAUUCCUGUGAAAGGCAC | |
| 649395 | | | ususa | | | |
| AD- | asascauuCfcUfGfUfgaaaggcacuL96 | | asGfsugcCf(Tgn)uucacaGfgAfaugu | | AAAACAUUCCUGUGAAAGGCACU | |
| 649396 | | | USUSU | | | |
| AD- | ascsauucCfuGfUfGfaaaggcacuuL96 | | asAfsgugCf(Cgn)uuucacAfgGfaaug | | AAACAUUCCUGUGAAAGGCACUU | |
| 649397 | | | USUSU | | | |
| AD- | csasuuccUfgUfGfAfaaggcacuuuL96 | | asAfsaguGf(Cgn)cuuucaCfaGfgaau | | AACAUUCCUGUGAAAGGCACUUU | |
| 649398 | | | gsusu | | | |
| AD- | asusuccuGfuGfAfAfaggcacuuuuL96 | | asAfsaag(Tgn)gccuuucAfcAfggaaus | | ACAUUCCUGUGAAAGGCACUUUU | |
| 649399 | | | gsu | | | |
| AD- | ususccugUfgAfAfAfggcacuuuuuL96 | | asAfsaaaGf(Tgn)gccuuuCfaCfaggaa | | CAUUCCUGUGAAAGGCACUUUUC | |
| 649400 | | | susg | | | |
| AD- | uscscuguGfaAfAfGfgcacuuuucaL96 | | usGfsaaa(Agn)gugccuuUfcAfcaggas | | AUUCCUGUGAAAGGCACUUUUCA | |
| 649401 | | | asu | | | |
| AD- | cscsugugAfaAfGfGfcacuuuucauL96 | | asUfsgaaAf(Agn)gugccuUfuCfacag | | UUCCUGUGAAAGGCACUUUUCAU | |
| 649402 | | | gsasa | | | |
| AD- | csusgugaAfaGfGfCfacuuuucauuL96 | | asAfsugaAf(Agn)agugccUfuUfcaca | | UCCUGUGAAAGGCACUUUUCAUU | |
| 649403 | | | gsgsa | | | |
| AD- | usgsugaaAfgGfCfAfcuuuucauuuL96 | | asAfsaugAf(Agn)aagugcCfuUfucac | | CCUGUGAAAGGCACUUUUCAUUC | |
| 649404 | | | asgsg | | | |
| AD- | gsusgaaaGfgCfAfCfuuuucauucuL96 | | asGfsaauGf(Agn)aaagugCfcUfuuca | | CUGUGAAAGGCACUUUUCAUUCC | |
| 649405 | | | csasg | | | |
| AD- | usgsaaagGfcAfCfUfuuucauuccaL96 | | usGfsgaa(Tgn)gaaaaguGfcCfuuucas | | UGUGAAAGGCACUUUUCAUUCCA | |
| 649406 | | | csa | | | |
| AD- | gsasaaggCfaCfUfUfuucauuccauL96 | | asUfsggaAf(Tgn)gaaaagUfgCfcuuu | | GUGAAAGGCACUUUUCAUUCCAC | |
| 649407 | | | csasc | | | |
| AD- | usgsuaacCfaAfGfAfguauuccauuL96 | | asAfsuggAfauacucuUfgGfuuacasus | | CAUGUAACCAAGAGUAUUCCAUU | |
| 68315 | | | g | | | |
| AD- | asasccaaGfaGfUfAfuuccauuuuuL96 | | asAfsaaaUfggaauacUfcUfugguusasc | | GUAACCAAGAGUAUUCCAUUUUU | |
| 68316 | | | | | | |
| AD- | csasgagaCfaAfUfAfaaacauuccuL96 | | asGfsgaaUfguuuuauUfgUfcucugscs | | GGCAGAGACAAUAAAACAUUCCU | |
| 68317 | | | c | | | |
| AD- | ususuuuaCfuAfAfAfgcaguguuuuL96 | | asAfsaacAfcugcuuuAfgUfaaaaasusg | | CAUUUUUACUAAAGCAGUGUUUU | |
| 68318 | | | | | | |
| AD- | ususucauGfuAfAfCfcaagaguauuL96 | | asAfsuacUfcuugguuAfcAfugaaasus | | GAUUUCAUGUAACCAAGAGUAUU | |
| 68326 | | | c | | | |
| AD- | csasauaaAfaCfAfUfuccugugaaaL96 | | usUfsucaCfaggaaugUfuUfuauugsus | | GACAAUAAAACAUUCCUGUGAAA | |
| 68327 | | | c | | | |
| AD- | asasccaaGfaGfUfAfuuccauuuuuL96 | | asAfsaaa(Tgn)ggaauacUfcUfugguus | | GUAACCAAGAGUAUUCCAUUUUU | |
| 157442.5 | | | asc | | | |
| AD- | csasgagaCfaAfUfAfaaacauuccuL96 | | asGfsgaa(Tgn)guuuuauUfgUfcucug | | GGCAGAGACAAUAAAACAUUCCU | |
| 157470.8 | | | scsc | | | |
| AD- | usgsggauUfuCfAfUfguaaccaagaL96 | | usCfsuugGfuuacaugAfaAfucccasusc | | GAUGGGAUUUCAUGUAACCAAGA | |
| 65480 | | | | | | |

TABLE 4
Single Dose In Vitro Screens in
Primary Cynomolgous Hepatocytes

| | % Message Remaining | | | | | |
|---|---|---|---|---|---|---|
| Duplex Name | 10 nM | Std Dev | 1 nM | Std Dev | 0.1 nM | Std Dev |
| AD-649237 | 9.9 | 1.6 | 27.7 | 4.0 | 72.9 | 8.7 |
| AD-649238 | 87.0 | 6.6 | 86.2 | 5.7 | 96.6 | 5.9 |
| AD-649239 | 14.1 | 2.9 | 18.6 | 3.2 | 69.7 | 8.5 |
| AD-649240 | 4.5 | 0.9 | 9.6 | 3.9 | 35.7 | 6.3 |
| AD-649241 | 8.5 | 3.9 | 14.8 | 1.3 | 52.8 | 6.1 |
| AD-649242 | 27.1 | 3.7 | 21.3 | 2.3 | 49.4 | 5.6 |
| AD-649243 | 8.6 | 1.8 | 11.3 | 1.4 | 38.9 | 4.6 |
| AD-649244 | 5.5 | 2.0 | 15.5 | 1.0 | 63.6 | 14.2 |
| AD-649245 | 7.5 | 1.1 | 23.1 | 6.0 | 68.6 | 6.6 |
| AD-649246 | 2.7 | 0.5 | 6.4 | 2.3 | 28.7 | 6.1 |
| AD-649247 | 3.2 | 0.6 | 7.7 | 3.0 | 38.1 | 5.7 |
| AD-649248 | 9.2 | 1.9 | 36.9 | 4.4 | 88.3 | 7.4 |
| AD-649249 | 11.1 | 2.0 | 42.2 | 2.9 | 93.0 | 8.3 |
| AD-649250 | 3.3 | 0.3 | 8.7 | 2.5 | 38.0 | 3.3 |
| AD-649251 | 1.4 | 0.4 | 1.8 | 0.6 | 12.8 | 2.7 |
| AD-65480 | 4.0 | 1.9 | 11.1 | 2.2 | 39.4 | 6.2 |
| AD-649252 | 10.2 | 3.1 | 30.2 | 5.9 | 70.5 | 8.6 |
| AD-649253 | 9.9 | 3.3 | 27.9 | 1.5 | 68.9 | 9.3 |
| AD-649254 | 5.9 | 1.5 | 19.2 | 5.6 | 59.5 | 11.5 |
| AD-649255 | 1.6 | 0.5 | 6.9 | 1.5 | 31.9 | 2.4 |
| AD-68326 | 2.3 | 0.5 | 8.2 | 1.9 | 35.1 | 9.8 |
| AD-649256 | 1.6 | 0.8 | 3.5 | 0.6 | 17.4 | 4.7 |
| AD-649258 | 3.0 | 0.8 | 7.1 | 1.8 | 34.6 | 21.0 |
| AD-649259 | 4.9 | 1.3 | 6.0 | 1.1 | 21.8 | 3.8 |
| AD-68315 | 1.0 | 0.6 | 2.7 | 0.7 | 13.6 | 5.2 |
| AD-649260 | 1.3 | 0.7 | 2.7 | 0.9 | 14.4 | 2.9 |
| AD-649261 | 2.6 | 0.5 | 5.5 | 1.5 | 25.3 | 3.9 |
| AD-68316 | 1.1 | 0.2 | 4.5 | 3.6 | 14.9 | 2.9 |
| AD-649262 | 1.4 | 0.5 | 3.9 | 1.7 | 22.1 | 5.6 |
| AD-649263 | 0.9 | 0.4 | 3.1 | 0.5 | 19.6 | 3.4 |
| AD-649264 | 2.4 | 2.1 | 4.5 | 2.2 | 15.7 | 4.9 |
| AD-649265 | 1.1 | 0.3 | 5.9 | 2.2 | 19.6 | 9.5 |
| AD-649266 | 0.8 | 0.5 | 1.7 | 0.5 | 12.2 | 1.6 |
| AD-649267 | 0.8 | 0.3 | 2.2 | 0.7 | 8.4 | 2.9 |
| AD-649268 | 1.5 | 0.7 | 3.6 | 0.9 | 20.3 | 6.5 |
| AD-649269 | 3.6 | 0.8 | 21.2 | 6.9 | 63.2 | 8.3 |
| AD-649270 | 6.4 | 0.9 | 22.6 | 4.0 | 68.2 | 6.9 |
| AD-649271 | 4.0 | 0.7 | 12.2 | 1.6 | 48.4 | 6.3 |
| AD-649272 | 5.4 | 4.8 | 10.2 | 2.8 | 45.7 | 15.6 |
| AD-649274 | 5.1 | 1.7 | 32.7 | 3.4 | 89.1 | 12.4 |
| AD-649275 | 3.4 | 1.2 | 10.8 | 2.4 | 46.3 | 10.2 |
| AD-649276 | 4.2 | 0.9 | 8.2 | 1.2 | 35.6 | 2.9 |
| AD-68318 | 1.1 | 0.6 | 6.4 | 0.7 | 20.1 | 6.4 |
| AD-649277 | 4.4 | 0.5 | 7.3 | 0.9 | 33.7 | 5.8 |
| AD-649278 | 2.2 | 0.7 | 4.8 | 0.9 | 27.0 | 8.2 |
| AD-649279 | 1.2 | 0.1 | 3.4 | 0.6 | 17.3 | 3.6 |
| AD-649280 | 0.9 | 0.3 | 2.9 | 0.4 | 17.7 | 4.7 |
| AD-649281 | 4.4 | 0.8 | 22.4 | 1.4 | 64.2 | 11.6 |
| AD-649282 | 2.0 | 0.8 | 5.6 | 0.9 | 27.8 | 9.3 |
| AD-649283 | 2.3 | 0.7 | 12.3 | 1.7 | 44.3 | 8.3 |
| AD-649284 | 2.0 | 2.1 | 2.8 | 0.7 | 18.6 | 3.4 |
| AD-649285 | 1.2 | 0.5 | 2.9 | 0.4 | 12.8 | 1.7 |
| AD-649286 | 1.6 | 0.4 | 3.2 | 1.1 | 17.5 | 7.6 |
| AD-649287 | 47.2 | 8.2 | 20.9 | 3.2 | 47.3 | 13.1 |
| AD-649288 | 5.7 | 2.2 | 10.2 | 1.4 | 36.8 | 7.7 |
| AD-649290 | 9.5 | 0.9 | 10.8 | 0.8 | 39.1 | 9.7 |
| AD-649291 | 7.7 | 1.7 | 8.6 | 0.3 | 32.4 | 5.1 |
| AD-649292 | 2.4 | 0.6 | 6.2 | 0.6 | 25.9 | 3.0 |
| AD-649293 | 4.4 | 1.0 | 13.9 | 2.4 | 51.9 | 9.0 |
| AD-649294 | 1.8 | 0.5 | 4.2 | 0.7 | 29.0 | 12.5 |
| AD-649295 | 6.8 | 1.2 | 8.5 | 1.4 | 29.5 | 4.4 |
| AD-649296 | 2.8 | 0.8 | 9.8 | 2.1 | 35.1 | 3.2 |
| AD-649297 | 17.4 | 1.9 | 29.4 | 5.6 | 61.7 | 10.8 |
| AD-68317 | 6.3 | 2.9 | 17.0 | 3.9 | 58.4 | 3.5 |
| AD-649298 | 3.7 | 3.0 | 7.7 | 1.7 | 33.4 | 8.2 |
| AD-649299 | 4.7 | 1.2 | 23.1 | 4.1 | 59.0 | 15.5 |
| AD-649300 | 4.9 | 1.4 | 15.5 | 5.3 | 48.7 | 9.7 |
| AD-649301 | 15.2 | 4.8 | 45.5 | 12.7 | 94.9 | 22.2 |
| AD-649302 | 6.5 | 0.3 | 21.1 | 3.7 | 67.4 | 4.6 |
| AD-68327 | 2.3 | 0.7 | 7.4 | 1.0 | 23.9 | 2.5 |
| AD-649303 | 44.1 | 8.6 | 28.0 | 4.1 | 69.5 | 8.6 |
| AD-649304 | 4.6 | 1.7 | 25.6 | 3.3 | 65.0 | 14.7 |
| AD-649305 | 22.5 | 3.3 | 55.8 | 6.2 | 100.1 | 3.5 |
| AD-649306 | 52.2 | 6.3 | 79.4 | 8.9 | 106.9 | 2.7 |
| AD-649307 | 13.5 | 1.0 | 18.8 | 2.6 | 56.4 | 5.6 |
| AD-649308 | 62.6 | 13.6 | 71.1 | 20.1 | 118.9 | 36.5 |
| AD-649309 | 50.2 | 4.3 | 62.2 | 6.3 | 82.1 | 6.9 |
| AD-649310 | 70.0 | 5.5 | 76.9 | 7.0 | 95.0 | 5.0 |
| AD-649311 | 83.6 | 3.3 | 78.4 | 6.0 | 99.3 | 5.2 |
| AD-649312 | 89.1 | 5.8 | 90.0 | 7.0 | 98.9 | 2.2 |
| AD-649313 | 91.8 | 2.4 | 91.7 | 10.4 | 102.8 | 5.3 |
| AD-649314 | 93.6 | 7.1 | 90.4 | 13.7 | 105.7 | 5.6 |
| AD-649315 | 88.2 | 3.0 | 78.5 | 8.0 | 93.5 | 8.0 |
| AD-649316 | 101.9 | 14.2 | 82.0 | 2.9 | 92.0 | 13.9 |
| AD-649318 | 86.1 | 3.0 | 88.5 | 7.3 | 85.6 | 1.4 |
| AD-649319 | 89.8 | 5.0 | 86.3 | 5.4 | 90.8 | 9.9 |

### Example 3. Structure Activity Relationship (SAR) of dsRNA Agents of Interest

[0774] The structure activity relationships of dsRNA agents of interest identified in Example 2 were performed. Agents were designed and synthesisized as described in Example 1. Single dose screens, in Hep3B cells, were performed as described in Example 2.

[0775] The unmodified nucleotide sequences of the agents in this example are shown in Table 5. The modified nucleotide sequences of the agents in this example are shown in Table 6. The results of the single dose screen are provided in Table 7.

TABLE 5
Unmodified Sense and Antisense Strand
Sequences of TTR dsRNA Agents

| | | SEQ | | SEQ |
|---|---|---|---|---|
| | Sense Sequence | ID | Antisense Sequence | ID |
| Duplex Name | 5′ to 3′ | NO: | 5′ to 3′ | NO: |
| AD-649263.3 | CCAAGAGUAUUCCAUUUUUAU | | AUAAAAAUGGAAUACUCUUGGUU | |
| AD-1134924.1 | CCAAGAGUAUUCCAUUUUUAU | | AUAAAAAUGGAAUACUCUUGGUU | |
| AD-1134925.1 | CCAAGAGUAUUCCAUUUUUAU | | AUAAAAAUGGAAUACUCUUGGUU | |
| AD-1134926.1 | CCAAGAGUAUUCCAUUUUUAU | | AUAAAAAUGGAAUACUCUUGGUU | |
| AD-1134927.1 | CCAAGAGUAUUCCAUUUUUAU | | AUAAAAAUGGAAUACUCUUGGUU | |
| AD-1134928.1 | CCAAGAGUAUUCCAUUUUUAU | | AUAAAAAUGGAAUACUCUUGGUU | |
| AD-1134929.1 | CCAAGAGUAUUCCAUUUUUAU | | AUAAAAAUGGAAUACUCUUGGUU | |
| AD-1134930.1 | CCAAGAGUAUUCCAUUUUUAU | | AUAAAAAUGGAAUACUCUUGGUU | |
| AD-1134931.1 | CCAAGAGUAUUCCAUUUUUAU | | AUAAAAAUGGAAUACUCUUGGUU | |
| AD-1134932.1 | CCAAGAGUAUUCCAUUUUUAU | | AUAAAAAUGGAAUACUCUUGGUU | |
| AD-1134933.1 | CCAAGAGUAUUCCAUUUUUAU | | AUAAAAAUGGAAUACUCUUGGUU | |
| AD-1134934.1 | CCAAGAGUAUUCCAUUUUUAU | | AUAAAAAUGGAAUACUCUUGGUU | |
| AD-1134935.1 | CCAAGAGUAUUCCAUUUUUAU | | AUAAAAAUGGAAUACUCUUGGCC | |
| AD-1134936.1 | AAGAGUAUUCCAUUUUUAU | | AUAAAAAUGGAAUACUCUUGG | |
| AD-1134937.1 | CCAAGAGUAUUCCAUUUUUAU | | AUAAAAAUGGAAUACUCUUGGCC | |
| AD-1134938.1 | AAGAGUAUUCCAUUUUUAU | | AUAAAAAUGGAAUACUCUUGG | |
| AD-1134939.1 | CCAAGAGUAUUCCAUUUUUAU | | AUAAAAAUGGAAUACUCUUGGCC | |
| AD-1134940.1 | AAGAGUAUUCCAUUUUUAU | | AUAAAAAUGGAAUACUCUUGG | |
| AD-1134941.1 | CCAAGAGUAUUCCAUUUUUAU | | AUAAAAAUGGAAUACUCUUGGCC | |
| AD-1134942.1 | AAGAGUAUUCCAUUUUUAU | | AUAAAAAUGGAAUACUCUUGG | |
| AD-1134943.1 | CCAAGAGUAUUCCAUUUUUAU | | AUAAAAAUGGAAUACUCUUGGCC | |
| AD-1134944.1 | AAGAGUAUUCCAUUUUUAU | | AUAAAAAUGGAAUACUCUUGG | |
| AD-1134945.1 | CCAAGAGUAUUCCAUUUUUAU | | AUAAAAAUGGAAUACUCUUGGCC | |
| AD-1134946.1 | AAGAGUAUUCCAUUUUUAU | | AUAAAAAUGGAAUACUCUUGG | |
| AD-1134947.1 | CCAAGAGUAUUCCAUUUUUAU | | AUAAAAAUGGAAUACUCUUGGCC | |
| AD-1134948.1 | AAGAGUAUUCCAUUUUUAU | | AUAAAAAUGGAAUACUCUUGG | |
| AD-649264.3 | CAAGAGUAUUCCAUUUUUACU | | AGUAAAAAUGGAAUACUCUUGGU | |
| AD-1134949.1 | CAAGAGUAUUCCAUUUUUACU | | AGUAAAAAUGGAAUACUCUUGGU | |
| AD-1134950.1 | CAAGAGUAUUCCAUUUUUACU | | AGUAAAAAUGGAAUACUCUUGGU | |
| AD-1134951.1 | CAAGAGUAUUCCAUUUUUACU | | AGUAAAAAUGGAAUACUCUUGGU | |
| AD-1134952.1 | CAAGAGUAUUCCAUUUUUACU | | AGUAAAAAUGGAAUACUCUUGGU | |
| AD-1134953.1 | CAAGAGTAUUCCAUUUUUACU | | AGUAAAAAUGGAAUACUCUUGGU | |
| AD-1134954.1 | CAAGAGUAUUCCAUUUUUACU | | AGUAAAAAUGGAAUACUCUUGCC | |
| AD-1134955.1 | AGAGUAUUCCAUUUUUACU | | AGUAAAAAUGGAAUACUCUUG | |
| AD-1134956.1 | CAAGAGUAUUCCAUUUUUACU | | AGUAAAAAUGGAATACUCUUGGU | |
| AD-1134957.1 | CAAGAGUAUUCCAUUUUUACU | | AGUAAAAAUGGAAUACUCUUGGU | |
| AD-1134958.1 | CAAGAGTAUUCCAUUUUUACU | | AGUAAAAAUGGAAUACUCUUGGU | |
| AD-1134959.1 | CAAGAGUAUUCCAUUUUUACU | | AGUAAAAAUGGAAUACUCUUGGU | |
| AD-1134960.1 | CAAGAGTAUUCCAUUUUUACU | | AGUAAAAAUGGAAUACUCUUGGU | |
| AD-1134961.1 | CAAGAGUAUUCCAUUUUUACU | | AGUAAAAAUGGAAUACUCUUGCC | |
| AD-1134962.1 | AGAGUAUUCCAUUUUUACU | | AGUAAAAAUGGAAUACUCUUG | |
| AD-1134963.1 | CAAGAGUAUUCCAUUUUUACU | | AGUAAAAAUGGAAUACUCUUGCC | |
| AD-1134964.1 | AGAGUAUUCCAUUUUUACU | | AGUAAAAAUGGAAUACUCUUG | |
| AD-1134965.1 | CAAGAGTAUUCCAUUUUUACU | | AGUAAAAAUGGAAUACUCUUGCC | |
| AD-1134966.1 | AGAGTAUUCCAUUUUUACU | | AGUAAAAAUGGAAUACUCUUG | |
| AD-1134967.1 | CAAGAGUAUUCCAUUUUUACU | | AGUAAAAAUGGAATACUCUUGCC | |
| AD-1134968.1 | AGAGUAUUCCAUUUUUACU | | AGUAAAAAUGGAATACUCUUG | |
| AD-649352.3 | AGAGUAUUCCAUUUUUACUAA | | UUAGUAAAAAUGGAAUACUCUUG | |
| AD-1134969.1 | AGAGUAUUCCAUUUUUACUAA | | UUAGUAAAAAUGGAAUACUCUUG | |
| AD-1134970.1 | AGAGUAUUCCAUUUUUACUAU | | AUAGUAAAAAUGGAAUACUCUUG | |
| AD-1134971.1 | AGAGUAUUCCAUUUUUACUAA | | UUAGTAAAAAUGGAAUACUCUUG | |
| AD-1134972.1 | AGAGUAUUCCAUUUUUACUAA | | UUAGUAAAAAUGGAAUACUCUUG | |
| AD-1134973.1 | AGAGUAUUCCAUUUUUACUAA | | UUAGTAAAAAUGGAAUACUCUUG | |
| AD-1134974.1 | AGAGUAUUCCAUUUUUACUAA | | UUAGUAAAAAUGGAAUACUCUUG | |
| AD-1134975.1 | AGAGUAUUCCAUUUUUACUAA | | UUAGUAAAAAUGGAAUACUCUCC | |
| AD-1134976.1 | AGUAUUCCAUUUUUACUAA | | UUAGUAAAAAUGGAAUACUCU | |
| AD-1134977.1 | AGAGUAUUCCAUUUUUACUAU | | AUAGTAAAAAUGGAAUACUCUUG | |
| AD-1134978.1 | AGAGUAUUCCAUUUUUACUAU | | AUAGTAAAAAUGGAAUACUCUUG | |
| AD-1134979.1 | AGAGUAUUCCAUUUUUACUAU | | AUAGTAAAAAUGGAAUACUCUUG | |
| AD-1134980.1 | AGAGUAUUCCAUUUUUACUAU | | AUAGTAAAAAUGGAAUACUCUUG | |
| AD-1134981.1 | AGAGUAUUCCAUUUUUACUAU | | AUAGTAAAAAUGGAAUACUCUUG | |
| AD-1134982.1 | AGAGUAUUCCAUUUUUACUAU | | AUAGTAAAAAUGGAAUACUCUUG | |
| AD-1134983.1 | AGAGUAUUCCAUUUUUACUAU | | AUAGTAAAAAUGGAAUACUCUUG | |
| AD-1134984.1 | AGAGUAUUCCAUUUUUACUAU | | AUAGTAAAAAUGGAAUACUCUUG | |
| AD-1134985.1 | AGAGUAUUCCAUUUUUACUAU | | AUAGTAAAAAUGGAAUACUCUUG | |
| AD-1134986.1 | AGAGUAUUCCAUUUUUACUAU | | AUAGTAAAAAUGGAAUACUCUUG | |
| AD-1134987.1 | AGAGUAUUCCAUUUUUACUAU | | AUAGTAAAAAUGGAAUACUCUUG | |
| AD-1134988.1 | AGAGUAUUCCAUUUUUACUAU | | AUAGTAAAAAUGGAAUACUCUUG | |
| AD-1134989.1 | AGAGUAUUCCAUUUUUACUAU | | AUAGTAAAAAUGGAAUACUCUCC | |
| AD-1134990.1 | AGAGUAUUCCAUUUUUACUAU | | AUAGTAAAAAUGGAAUACUCUCC | |
| AD-1134991.1 | AGAGUAUUCCAUUUUUACUAU | | AUAGTAAAAAUGGAAUACUCUCC | |
| AD-1134992.1 | AGAGUAUUCCAUUUUUACUAU | | AUAGTAAAAAUGGAAUACUCUCC | |
| AD-1134993.1 | AGUAUUCCAUUUUUACUAU | | AUAGTAAAAAUGGAAUACUCU | |
| AD-1134994.1 | AGUAUUCCAUUUUUACUAU | | AUAGTAAAAAUGGAAUACUCU | |
| AD-1134995.1 | AGUAUUCCAUUUUUACUAU | | AUAGTAAAAAUGGAAUACUCU | |
| AD-1134996.1 | AGUAUUCCAUUUUUACUAU | | AUAGTAAAAAUGGAAUACUCU | |
| AD-1134997.1 | AGAGUAUUCCAUUUUUACUAA | | UUAGUAAAAAUGGAAUACUCUUG | |
| AD-823016.4 | CUAAAGCAGUGUUUUCACCUA | | UAGGTGAAAACACUGCUUUAGUA | |
| AD-1134998.1 | CUAAAGCAGUGUUUUCACCUA | | UAGGTGAAAACACUGCUUUAGUA | |
| AD-1134999.1 | CUAAAGCAGUGUUUUCACCUA | | UAGGTGAAAACACUGCUUUAGUA | |
| AD-1135000.1 | CUAAAGCAGUGUUUUCACCUU | | AAGGTGAAAACACUGCUUUAGUA | |
| AD-1135001.1 | CUAAAGCAGUGUUUUCACCUA | | UAGGTGAAAACACUGCUUUAGUA | |
| AD-1135002.1 | CUAAAGCAGUGUUUUCACCUA | | UAGGTGAAAACACUGCUUUAGCC | |
| AD-1135003.1 | AAAGCAGUGUUUUCACCUA | | UAGGTGAAAACACUGCUUUAG | |
| AD-1135004.1 | CUAAAGCAGUGUUUUCACCUA | | AAGGTGAAAACACUGCUUUAGUA | |
| AD-1135005.1 | CUAAAGCAGUGUUUUCACCUA | | AAGGTGAAAACACUGCUUUAGUA | |
| AD-1135006.1 | CUAAAGCAGUGUUUUCACCUA | | AAGGTGAAAACACUGCUUUAGCC | |
| AD-1135007.1 | CUAAAGCAGUGUUUUCACCUA | | AAGGTGAAAACACUGCUUUAGCC | |
| AD-1135008.1 | AAAGCAGUGUUUUCACCUA | | AAGGTGAAAACACUGCUUUAG | |
| AD-1135009.1 | AAAGCAGUGUUUUCACCUA | | AAGGTGAAAACACUGCUUUAG | |

TABLE 6
Modified Sense and Antisense Strand Sequences of TTR dsRNA Agents

| | | SEQ | | SEQ | | SEQ |
|---|---|---|---|---|---|---|
| Duplex | | ID | | ID | | ID |
| Name | Sense Sequence 5′ to 3′ | NO: | Antisense Sequence 5′ to 3′ | NO: | mRNA Target Sequence | NO: |
| AD- | cscsaagaGfuAfUfUfccauuu | | asUfsaaaAfauggaauAfcUfcuuggsusu | | AACCAAGAGUAUUCCAUUUUU | |
| 649263.3 | uuauL96 | | | | AC | |
| AD- | cscsaagaguAfUfUfccauuuu | | asUfsaaaAfauggaauAfcUfcuuggsusu | | AACCAAGAGUAUUCCAUUUUU | |
| 1134924.1 | uauL96 | | | | AC | |
| AD- | cscsaagadGuAfUfUfccauu | | asUfsaaaAfauggaauAfcUfcuuggsusu | | AACCAAGAGUAUUCCAUUUUU | |
| 1134925.1 | uuuauL96 | | | | AC | |
| AD- | cscsaagagudAUfUfccauuu | | asUfsaaaAfauggaauAfcUfcuuggsusu | | AACCAAGAGUAUUCCAUUUUU | |
| 1134926.1 | uuauL96 | | | | AC | |
| AD- | cscsaagadGudAUfUfccauu | | asUfsaaaAfauggaauAfcUfcuuggsusu | | AACCAAGAGUAUUCCAUUUUU | |
| 1134927.1 | uuuauL96 | | | | AC | |
| AD- | cscsaagaGfuAfUfUfccauu | | asUfsaadAadAuggaauAfcUfcuuggsus | | AACCAAGAGUAUUCCAUUUUU | |
| 1134928.1 | uuuauL96 | | u | | AC | |
| AD- | cscsaagaGfuAfUfUfccauu | | asUfsaaaAfauggaaudAcUfcuuggsusu | | AACCAAGAGUAUUCCAUUUUU | |
| 1134929.1 | uuuauL96 | | | | AC | |
| AD- | cscsaagaGfuAfUfUfccauu | | asUfsaadAadAuggaaudAcUfcuuggsus | | AACCAAGAGUAUUCCAUUUUU | |
| 1134930.1 | uuuauL96 | | u | | AC | |
| AD- | cscsaagaguAfUfUfccauuu | | asUfsaadAadAuggaauAfcUfcuuggsus | | AACCAAGAGUAUUCCAUUUUU | |
| 1134931.1 | uuauL96 | | u | | AC | |
| AD- | cscsaagadGuAfUfUfccauu | | asUfsaadAadAuggaauAfcUfcuuggsus | | AACCAAGAGUAUUCCAUUUUU | |
| 1134932.1 | 9uuuauL6 | | u | | AC | |
| AD- | cscsaagaguAfUfUfccauu | | asUfsaadAadAuggaaudAcUfcuuggsus | | AACCAAGAGUAUUCCAUUUUU | |
| 1134933.1 | uuuauL96 | | u | | AC | |
| AD- | cscsaagadGuAfUfUfccau | | asUfsaadAadAuggaaudAcUfcuuggsus | | AACCAAGAGUAUUCCAUUUUU | |
| 1134934.1 | uuuuauL96 | | u | | AC | |
| AD- | cscsaagaGfuAfUfUfccauu | | asUfsaaaAfauggaauAfcUfcuuggscsc | | CCAAGAGUAUUCCAUUUUUAC | |
| 1134935.1 | uuuauL96 | | | | | |
| AD- | asasgaGfuAfUfUfccauuuu | | asUfsaaaAfauggaauAfcUfcuusgsg | | AACCAAGAGUAUUCCAUUUUU | |
| 1134936.1 | uauL96 | | | | AC | |
| AD- | cscsaagaguAfUfUfccauuu | | asUfsaadAadAuggaauAfcUfcuuggscsc | | CCAAGAGUAUUCCAUUUUUAC | |
| 1134937.1 | uuauL96 | | | | | |
| AD- | asasgaguAfUfUfccauuuu | | asUfsaadAadAuggaauAfcUfcuusgsg | | AACCAAGAGUAUUCCAUUUUU | |
| 1134938.1 | uauL96 | | | | AC | |
| AD- | cscsaagadGuAfUfUfccauu | | asUfsaadAadAuggaauAfcUfcuuggscsc | | CCAAGAGUAUUCCAUUUUUAC | |
| 1134939.1 | uuuauL96 | | | | | |
| AD- | asasgadGuAfUfUfccauuuu | | asUfsaadAadAuggaauAfcUfcuusgsg | | AACCAAGAGUAUUCCAUUUUU | |
| 1134940.1 | uauL96 | | | | AC | |
| AD- | cscsaagagudAUfUfccauuu | | asUfsaadAadAuggaauAfcUfcuuggscsc | | CCAAGAGUAUUCCAUUUUUAC | |
| 1134941.1 | uuauL96 | | | | | |
| AD- | asasgagudAUfUfccauuuu | | asUfsaadAadAuggaauAfcUfcuusgsg | | AACCAAGAGUAUUCCAUUUUU | |
| 1134942.1 | uauL96 | | | | AC | |
| AD- | cscsaagadGudAUfUfccau | | asUfsaadAadAuggaauAfcUfcuuggscsc | | CCAAGAGUAUUCCAUUUUUAC | |
| 1134943.1 | uuuuauL96 | | | | | |
| AD- | asasgadGudAUfUfccauuu | | asUfsaadAadAuggaauAfcUfcuusgsg | | AACCAAGAGUAUUCCAUUUUU | |
| 1134944.1 | uuauL96 | | | | AC | |
| AD- | cscsaagagudAUfUfccauuu | | asUfsaadAadAuggaaudAcUfcuuggscs | | CCAAGAGUAUUCCAUUUUUAC | |
| 1134945.1 | uuauL96 | | c | | | |
| AD- | asasgagudAUfUfccauuu | | asUfsaadAadAuggaaudAcUfcuusgsg | | AACCAAGAGUAUUCCAUUUUU | |
| 1134946.1 | uuauL96 | | | | AC | |
| AD- | cscsaagadGudAUfUfcca | | asUfsaadAadAuggaaudAcUfcuuggscs | | CCAAGAGUAUUCCAUUUUUAC | |
| 1134947.1 | uuuuuauL96 | | c | | | |
| AD- | asasgadGudAUfUfccauu | | asUfsaadAadAuggaaudAcUfcuusgsg | | AACCAAGAGUAUUCCAUUUUU | |
| 1134948.1 | uuuauL96 | | | | AC | |
| AD- | csasagagUfaUfUfCfcauuu | | asGfsuaaAfaauggaaUfaCfucuugsgsu | | ACCAAGAGUAUUCCAUUUUUAC | |
| 649264.3 | uuacuL96 | | | | U | |
| AD- | csasagagUfaUfUfCfcauuu | | asdGsuaaAfaauggaaUfaCfucuugsgsu | | ACCAAGAGUAUUCCAUUUUUAC | |
| 1134949.1 | uuacuL96 | | | | U | |
| AD- | csasagagUfaUfUfCfcauuu | | asGfsuadAadAauggaaUfaCfucuugsgs | | ACCAAGAGUAUUCCAUUUUUAC | |
| 1134950.1 | uuacuL96 | | u | | U | |
| AD- | csasagagUfaUfUfCfcauuu | | asdGsuadAadAauggaaUfaCfucuugsgs | | ACCAAGAGUAUUCCAUUUUUAC | |
| 1134951.1 | uuacuL96 | | u | | U | |
| AD- | csasagaguaUfUfCfcauuuu | | asGfsuaaAfaauggaaUfaCfucuugsgsu | | ACCAAGAGUAUUCCAUUUUUAC | |
| 1134952.1 | uacuL96 | | | | U | |
| AD- | csasagagdTaUfUfCfcauu | | asGfsuaaAfaauggaaUfaCfucuugsgsu | | ACCAAGAGUAUUCCAUUUUUAC | |
| 1134953.1 | uuuacuL96 | | | | U | |
| AD- | csasagagUfaUfUfCfcauuu | | asGfsuaaAfaauggaaUfaCfucuugscsc | | ACCAAGAGUAUUCCAUUUUUAC | |
| 1134954.1 | uuacuL96 | | | | U | |
| AD- | asgsagUfaUfUfCfcauuuu | | asGfsuaaAfaauggaaUfaCfucususg | | CAAGAGUAUUCCAUUUUUACU | |
| 1134955.1 | uacuL96 | | | | | |
| AD- | csasagaguaUfUfCfcauuu | | asdGsuadAadAauggdAadTadCucuugs | | ACCAAGAGUAUUCCAUUUUUAC | |
| 1134956.1 | uuacuL96 | | gsu | | U | |
| AD- | csasagaguaUfUfCfcauuu | | asdGsuaaAfaauggaaUfaCfucuugsgsu | | ACCAAGAGUAUUCCAUUUUUAC | |
| 1134957.1 | uuacuL96 | | | | U | |
| AD- | csasagagdTaUfUfCfcauu | | asdGsuaaAfaauggaaUfaCfucuugsgsu | | ACCAAGAGUAUUCCAUUUUUAC | |
| 1134958.1 | uuuacuL96 | | | | U | |
| AD- | csasagaguaUfUfCfcauuu | | asdGsuadAadAauggaaUfaCfucuugsgs | | ACCAAGAGUAUUCCAUUUUUAC | |
| 1134959.1 | uuacuL96 | | u | | U | |
| AD- | csasagagdTaUfUfCfcauu | | asdGsuadAadAauggaaUfaCfucuugsgs | | ACCAAGAGUAUUCCAUUUUUAC | |
| 1134960.1 | uuuacuL96 | | u | | U | |
| AD- | csasagagUfaUfUfCfcauu | | asdGsuadAadAauggaaUfaCfucuugscs | | ACCAAGAGUAUUCCAUUUUUAC | |
| 1134961.1 | uuuacuL96 | | c | | U | |
| AD- | asgsagUfaUfUfCfcauuuu | | asdGsuadAadAauggaaUfaCfucususg | | CAAGAGUAUUCCAUUUUUACU | |
| 1134962.1 | uacuL96 | | | | | |
| AD- | csasagaguaUfUfCfcauuu | | asdGsuadAadAauggaaUfaCfucuugscs | | ACCAAGAGUAUUCCAUUUUUAC | |
| 1134963.1 | uuacuL96 | | c | | U | |
| AD- | asgsaguaUfUfCfcauuuuu | | asdGsuadAadAauggaaUfaCfucususg | | CAAGAGUAUUCCAUUUUUACU | |
| 1134964.1 | acuL96 | | | | | |
| AD- | csasagagdTaUfUfCfcauu | | asdGsuadAadAauggaaUfaCfucuugscs | | ACCAAGAGUAUUCCAUUUUUAC | |
| 1134965.1 | uuuacuL96 | | c | | U | |
| AD- | asgsagdTaUfUfCfcauuuu | | asdGsuadAadAauggaaUfaCfucususg | | CAAGAGUAUUCCAUUUUUACU | |
| 1134966.1 | uacuL96 | | | | | |
| AD- | csasagaguaUfUfCfcauuuu | | asdGsuadAadAauggdAadTadCucuugs | | ACCAAGAGUAUUCCAUUUUUAC | |
| 1134967.1 | uacuL96 | | CSC | | U | |
| AD- | asgsaguaUfUfCfcauuuuu | | asdGsuadAadAauggdAadTadCucusus | | CAAGAGUAUUCCAUUUUUACU | |
| 1134968.1 | acuL96 | | g | | | |
| AD- | asgsaguaUfuCfCfAfuuuu | | usUfsaguAf(Agn)aaauggAfaUfacucus | | CAAGAGUAUUCCAUUUUUACU | |
| 649352.3 | uacuaaL96 | | usg | | AA | |
| AD- | asgsaguaUfuCfCfdAuuu | | usUfsaguAf(Agn)aaauggAfaUfacucus | | CAAGAGUAUUCCAUUUUUACU | |
| 1134969.1 | uuacuaaL96 | | usg | | AA | |
| AD- | asgsaguaUfuCfcdAUfuuu | | usUfsaguAf(Agn)aaauggAfaUfacucus | | CAAGAGUAUUCCAUUUUUACU | |
| 1134970.1 | uacuaaL96 | | usg | | AA | |
| AD- | asgsaguaUfuCfCfAfuuuuua | | asUfsaguAf(Agn)aaauggAfaUfacucus | | CAAGAGUAUUCCAUUUUUACU | |
| 1134971.1 | cuauL96 | | usg | | AA | |
| AD- | asgsaguaUfuCfCfAfuuuuuac | | usUfsagdTa(Agn)aaauggAfaUfacucus | | CAAGAGUAUUCCAUUUUUACU | |
| 1134972.1 | uaaL96 | | usg | | AA | |
| AD- | asgsaguaUfuCfCfAfuuuuua | | usUfsaguAf(A2p)aaauggAfaUfacucus | | CAAGAGUAUUCCAUUUUUACU | |
| 1134973.1 | cuaaL96 | | usg | | AA | |
| AD- | asgsaguaUfuCfCfAfuuuuuac | | usUfsagdTa(A2p)aaauggAfaUfacucus | | CAAGAGUAUUCCAUUUUUACU | |
| 1134974.1 | uaaL96 | | usg | | AA | |
| AD- | asgsaguaUfuCfCfAfuuuuua | | usUfsaguAf(Agn)aaauggdAaUfacucus | | CAAGAGUAUUCCAUUUUUACU | |
| 1134975.1 | cuaaL96 | | usg | | AA | |
| AD- | asgsaguaUfuCfCfAfuuuuuac | | usUfsaguAf(Agn)aaauggAfaUfacucus | | CAAGAGUAUUCCAUUUUUACU | |
| 1134976.1 | uaaL96 | | CSC | | AA | |
| AD- | asgsuaUfuCfCfAfuuuuuacu | | usUfsaguAf(Agn)aaauggAfaUfacuscs | | AGAGUAUUCCAUUUUUACUAA | |
| 1134977.1 | aaL96 | | u | | | |
| AD- | asgsaguaUfuCfCfAfuuuuuac | | asUfsagdTa(Agn)aaauggAfaUfacucus | | CAAGAGUAUUCCAUUUUUACU | |
| 1134978.1 | uauL96 | | usg | | AA | |
| AD- | asgsaguaUfuCfCfAfuuuuua | | asUfsagdTa(Agn)aaauggdAaUfacucus | | CAAGAGUAUUCCAUUUUUACU | |
| 1134979.1 | cuauL96 | | usg | | AA | |
| AD- | asgsaguaUfuCfCfAfuuuuua | | asUfsagdTa(A2p)aaauggAfaUfacucus | | CAAGAGUAUUCCAUUUUUACU | |
| 1134980.1 | cuauL96 | | usg | | AA | |
| AD- | asgsaguaUfuCfCfAfuuuuuac | | asUfsagdTa(A2p)aaauggdAaUfacucus | | CAAGAGUAUUCCAUUUUUACU | |
| 1134981.1 | uauL96 | | usg | | AA | |
| AD- | asgsaguaUfuCfCfdAuuuuua | | asUfsagdTa(Agn)aaauggAfaUfacucus | | CAAGAGUAUUCCAUUUUUACU | |
| 1134982.1 | cuauL96 | | usg | | AA | |
| AD- | asgsaguaUfuCfCfdAuuuuua | | asUfsagdTa(Agn)aaauggdAaUfacucus | | CAAGAGUAUUCCAUUUUUACU | |
| 1134983.1 | 9cuauL6 | | usg | | AA | |
| AD- | asgsaguaUfuCfCfdAuuuuu | | asUfsagdTa(A2p)aaauggAfaUfacucus | | CAAGAGUAUUCCAUUUUUACU | |
| 1134984.1 | acuauL96 | | usg | | AA | |
| AD- | asgsaguaUfuCfCfdAuuuuua | | asUfsagdTa(A2p)aaauggdAaUfacucus | | CAAGAGUAUUCCAUUUUUACU | |
| 1134985.1 | cuauL96 | | usg | | AA | |
| AD- | asgsaguaUfuCfcdAUfuuuu | | asUfsagdTa(Agn)aaauggAfaUfacucus | | CAAGAGUAUUCCAUUUUUACU | |
| 1134986.1 | acuauL96 | | usg | | AA | |
| AD- | asgsaguaUfuCfcdAUfuuuua | | asUfsagdTa(Agn)aaauggdAaUfacucus | | CAAGAGUAUUCCAUUUUUACU | |
| 1134987.1 | cuauL96 | | usg | | AA | |
| AD- | asgsaguaUfuCfcdAUfuuuu | | asUfsagdTa(A2p)aaauggAfaUfacucus | | CAAGAGUAUUCCAUUUUUACU | |
| 1134988.1 | acuauL96 | | usg | | AA | |
| AD- | asgsaguaUfuCfcdAUfuuuua | | asUfsagdTa(A2p)aaauggdAaUfacucus | | CAAGAGUAUUCCAUUUUUACU | |
| 1134989.1 | cuauL96 | | usg | | AA | |
| AD- | asgsaguaUfuCfCfdAuuuuu | | asUfsagdTa(Agn)aaauggAfaUfacucus | | CAAGAGUAUUCCAUUUUUACU | |
| 1134990.1 | acuauL96 | | CSC | | AA | |
| AD- | asgsaguaUfuCfCfdAuuuu | | asUfsagdTa(Agn)aaauggdAaUfacucus | | CAAGAGUAUUCCAUUUUUACU | |
| 1134991.1 | uacuauL96 | | CSC | | AA | |
| AD- | asgsaguaUfuCfCfdAuuuuua | | asUfsagdTa(A2p)aaauggAfaUfacucus | | CAAGAGUAUUCCAUUUUUACU | |
| 1134992.1 | cuauL96 | | CSC | | AA | |
| AD- | asgsaguaUfuCfCfdAuuuu | | asUfsagdTa(A2p)aaauggdAaUfacucus | | CAAGAGUAUUCCAUUUUUACU | |
| 1134993.1 | uacuauL96 | | CSC | | AA | |
| AD- | asgsuaUfuCfCfdAuuuuuac | | asUfsagdTa(Agn)aaauggAfaUfacuscs | | AGAGUAUUCCAUUUUUACUAA | |
| 1134994.1 | uauL96 | | u | | | |
| AD- | asgsuaUfuCfCfdAuuuuuac | | asUfsagdTa(Agn)aaauggdAaUfacuscs | | AGAGUAUUCCAUUUUUACUAA | |
| 1134995.1 | uauL96 | | u | | | |
| AD- | asgsuaUfuCfCfdAuuuuua | | asUfsagdTa(A2p)aaauggAfaUfacuscs | | AGAGUAUUCCAUUUUUACUAA | |
| 1134996.1 | cuauL96 | | u | | | |
| AD- | asgsuaUfuCfCfdAuuuuua | | asUfsagdTa(A2p)aaauggdAaUfacuscs | | AGAGUAUUCCAUUUUUACUAA | |
| 1134997.1 | cuauL96 | | u | | | |
| AD- | csusaaagCfaGfUfGfuuu | | usAfsggdTg(A2p)aaacacUfgCfuuuags | | UACUAAAGCAGUGUUUUCACCU | |
| 823016.4 | ucaccuaL96 | | usa | | C | |
| AD- | csusaaagCfagUfdGuuuuc | | usAfsggdTg(A2p)aaacacUfgCfuuuags | | UACUAAAGCAGUGUUUUCACCU | |
| 1134998.1 | accuaL96 | | usa | | C | |
| AD- | csusaaagCfadGudGUfuuuc | | usAfsggdTg(A2p)aaacacUfgCfuuuags | | UACUAAAGCAGUGUUUUCACCU | |
| 1134999.1 | accuaL96 | | usa | | C | |
| AD- | csusaaagCfaGfUfGfuuuuc | | asAfsggdTg(A2p)aaacacUfgCfuuuags | | UACUAAAGCAGUGUUUUCACCU | |
| 1135000.1 | accuuL96 | | usa | | C | |
| AD- | csusaaagCfaGfUfGfuuuuc | | usdAsggdTg(A2p)aaacacUfgCfuuuags | | UACUAAAGCAGUGUUUUCACCU | |
| 1135001.1 | accuaL96 | | usa | | C | |
| AD- | csusaaagCfaGfUfGfuuuuc | | usAfsggdTg(A2p)aaacacUfgCfuuuags | | UACUAAAGCAGUGUUUUCACCU | |
| 1135002.1 | accuaL96 | | CSC | | C | |
| AD- | asasagCfaGfUfGfuuuucac | | usAfsggdTg(A2p)aaacacUfgCfuuusas | | CUAAAGCAGUGUUUUCACCUC | |
| 1135003.1 | cuaL96 | | g | | | |
| AD- | csusaaagCfagUfdGuuuuca | | asdAsggdTg(A2p)aaacacUfgCfuuuags | | UACUAAAGCAGUGUUUUCACCU | |
| 1135004.1 | ccuaL96 | | usa | | C | |
| AD- | csusaaagCfadGudGUfuuuc | | asdAsggdTg(A2p)aaacacUfgCfuuuags | | UACUAAAGCAGUGUUUUCACCU | |
| 1135005.1 | accuaL96 | | usa | | C | |
| AD- | csusaaagCfagUfdGuuuuc | | asdAsggdTg(A2p)aaacacUfgCfuuuags | | UACUAAAGCAGUGUUUUCACCU | |
| 1135006.1 | accuaL96 | | CSC | | C | |
| AD- | csusaaagCfadGudGUfuuu | | asdAsggdTg(A2p)aaacacUfgCfuuuags | | UACUAAAGCAGUGUUUUCACCU | |
| 1135007.1 | caccuaL96 | | CSC | | C | |
| AD- | asasagCfagUfdGuuuuca | | asdAsggdTg(A2p)aaacacUfgCfuuusas | | CUAAAGCAGUGUUUUCACCUC | |
| 1135008.1 | ccuaL96 | | g | | | |
| AD- | asasagCfadGudGUfuuuca | | asdAsggdTg(A2p)aaacacUfgCfuuusas | | CUAAAGCAGUGUUUUCACCUC | |
| 1135009.1 | ccuaL96 | | g | | | |

TABLE 7
Single Dose In Vitro Screens in Hep3B Cells

| Duplex Name | 50 nM | STDEV | 10 nM | STDEV | 1 nM | STDEV | 0.1 nM | STDEV |
|---|---|---|---|---|---|---|---|---|
| AD-649263.3 | 3.59 | 0.88 | 2.58 | 0.54 | 3.39 | 1.09 | 20.52 | 6.80 |
| AD-1134924.1 | 3.51 | 1.42 | 3.92 | 1.91 | 3.71 | 0.96 | 19.87 | 4.64 |
| AD-1134925.1 | 4.05 | 2.40 | 3.05 | 1.08 | 4.14 | 2.53 | 12.92 | 3.98 |
| AD-1134926.1 | 4.50 | 1.35 | 3.34 | 1.23 | 5.55 | 1.89 | 16.21 | 6.50 |
| AD-1134927.1 | 3.59 | 1.19 | 3.73 | 0.31 | 5.13 | 1.98 | 14.40 | 2.57 |
| AD-1134928.1 | 2.56 | 0.69 | 2.91 | 0.49 | 3.47 | 0.51 | 11.03 | 3.20 |
| AD-1134929.1 | 3.37 | 1.82 | 3.17 | 0.87 | 4.80 | 1.24 | 16.19 | 2.50 |
| AD-1134930.1 | 1.49 | 0.39 | 2.08 | 0.62 | 3.53 | 1.23 | 7.57 | 2.29 |
| AD-1134931.1 | 3.62 | 1.19 | 3.97 | 1.54 | 3.18 | 1.65 | 21.57 | 6.92 |
| AD-1134932.1 | 5.82 | 0.79 | 5.16 | 1.62 | 6.94 | 1.25 | 21.26 | 5.08 |
| AD-1134933.1 | 3.59 | 1.05 | 4.11 | 1.12 | 4.99 | 1.37 | 22.04 | 6.24 |
| AD-1134934.1 | 5.43 | 2.04 | 4.00 | 0.68 | 7.60 | 1.66 | 30.92 | 12.34 |
| AD-1134935.1 | 3.42 | 1.76 | 3.95 | 0.35 | 7.74 | 1.70 | 27.25 | 9.69 |
| AD-1134936.1 | 2.40 | 1.13 | 3.80 | 0.59 | 5.33 | 2.39 | 16.94 | 5.51 |
| AD-1134937.1 | 2.51 | 0.82 | 3.36 | 0.73 | 6.37 | 1.93 | 21.05 | 9.05 |
| AD-1134938.1 | 1.17 | 0.50 | 3.26 | 0.90 | 3.04 | 0.58 | 7.20 | 2.40 |
| AD-1134939.1 | 2.86 | 0.77 | 3.01 | 1.13 | 3.30 | 0.44 | 15.87 | 2.88 |
| AD-1134940.1 | 4.44 | 2.00 | 3.07 | 0.67 | 6.62 | 4.33 | 21.03 | 1.48 |
| AD-1134941.1 | 4.28 | 2.31 | 3.91 | 0.32 | 7.30 | 2.83 | 25.80 | 3.90 |
| AD-1134942.1 | 2.72 | 1.50 | 4.69 | 1.12 | 4.05 | 1.47 | 18.32 | 7.37 |
| AD-1134943.1 | 1.77 | 0.64 | 4.12 | 1.01 | 6.19 | 2.72 | 20.18 | 9.77 |
| AD-1134944.1 | 1.85 | 1.49 | 3.01 | 0.77 | 5.35 | 2.37 | 15.78 | 5.59 |
| AD-1134945.1 | 1.75 | 0.35 | 3.64 | 1.82 | 9.89 | 9.93 | 19.27 | 13.11 |
| AD-1134946.1 | 4.15 | 0.57 | 4.52 | 1.18 | 5.21 | 0.76 | 21.71 | 9.03 |
| AD-1134947.1 | 3.12 | 1.73 | 5.81 | 1.13 | 14.51 | 1.78 | 37.70 | 5.89 |
| AD-1134948.1 | 2.66 | 1.03 | 3.99 | 0.78 | 8.53 | 2.73 | 19.97 | 3.13 |
| AD-649264.3 | 3.32 | 1.61 | 3.17 | 0.90 | 7.01 | 1.58 | 21.67 | 8.15 |
| AD-1134949.1 | 2.75 | 2.07 | 3.68 | 1.27 | 5.56 | 1.29 | 20.73 | 5.70 |
| AD-1134950.1 | 1.36 | 0.52 | 3.16 | 1.92 | 4.69 | 1.97 | 9.24 | 2.27 |
| AD-1134951.1 | 0.75 | 0.25 | 4.34 | 5.81 | 3.03 | 1.11 | 5.28 | 4.51 |
| AD-1134952.1 | 5.01 | 2.65 | 3.89 | 1.18 | 8.17 | 3.89 | 27.68 | 21.94 |
| AD-1134953.1 | 3.09 | 1.52 | 5.80 | 3.12 | 7.95 | 2.08 | 31.87 | 12.75 |
| AD-1134954.1 | 4.92 | 5.84 | 3.93 | 1.27 | 10.77 | 4.69 | 28.26 | 4.34 |
| AD-1134955.1 | 3.12 | 2.13 | 5.33 | 0.97 | 8.02 | 2.07 | 25.60 | 6.65 |
| AD-1134956.1 | 1.76 | 1.07 | 2.99 | 1.01 | 6.10 | 1.87 | 22.32 | 1.75 |
| AD-1134957.1 | 4.09 | 3.22 | 3.66 | 0.88 | 14.04 | 13.75 | 20.80 | 4.66 |
| AD-1134958.1 | 1.24 | 0.21 | 4.40 | 1.49 | 5.76 | 1.87 | 19.18 | 6.34 |
| AD-1134959.1 | 1.56 | 1.77 | 3.10 | 0.83 | 3.30 | 1.89 | 11.39 | 2.37 |
| AD-1134960.1 | 4.46 | 1.74 | 4.21 | 1.09 | 4.41 | 1.49 | 10.29 | 2.93 |
| AD-1134961.1 | 6.34 | 4.62 | 3.98 | 1.21 | 9.72 | 2.44 | 29.22 | 23.79 |
| AD-1134962.1 | 1.49 | 0.58 | 3.94 | 1.20 | 11.88 | 13.87 | 13.84 | 4.48 |
| AD-1134963.1 | 4.88 | 4.27 | 6.19 | 2.27 | 7.99 | 2.97 | 18.86 | 5.66 |
| AD-1134964.1 | 1.75 | 0.29 | 3.80 | 1.56 | 4.66 | 0.57 | 12.11 | 2.11 |
| AD-1134965.1 | 1.67 | 0.78 | 4.23 | 0.69 | 7.61 | 0.83 | 12.17 | 4.72 |
| AD-1134966.1 | 0.72 | 0.10 | 2.98 | 0.56 | 3.87 | 1.61 | 7.78 | 2.16 |
| AD-1134967.1 | 3.59 | 1.39 | 3.29 | 0.68 | 8.67 | 3.14 | 27.10 | 6.99 |
| AD-1134968.1 | 9.29 | 7.68 | 6.48 | 2.93 | 13.13 | 2.21 | 41.28 | 12.20 |
| AD-649352.3 | 2.22 | 1.19 | 4.53 | 1.38 | 12.49 | 2.22 | 33.30 | 9.49 |
| AD-1134969.1 | 3.79 | 1.67 | 5.69 | 1.38 | 10.04 | 1.51 | 34.14 | 8.78 |
| AD-1134970.1 | 1.92 | 1.03 | 2.92 | 0.39 | 6.29 | 0.67 | 16.78 | 4.95 |
| AD-1134971.1 | 1.47 | 0.50 | 3.85 | 1.21 | 6.99 | 0.82 | 20.25 | 7.51 |
| AD-1134972.1 | 2.25 | 1.10 | 5.17 | 1.48 | 8.78 | 4.43 | 26.72 | 7.62 |
| AD-1134973.1 | 1.21 | 0.53 | 2.52 | 0.92 | 3.90 | 1.39 | 15.91 | 6.51 |
| AD-1134974.1 | 2.42 | 0.92 | 3.02 | 0.73 | 10.75 | 6.21 | 21.16 | 10.37 |
| AD-1134975.1 | 5.56 | 1.44 | 8.79 | 0.90 | 25.39 | 9.89 | 73.20 | 17.49 |
| AD-1134976.1 | 4.01 | 2.02 | 7.02 | 1.49 | 16.12 | 6.64 | 46.99 | 4.67 |
| AD-1134977.1 | 5.25 | 4.03 | 6.17 | 1.49 | 13.32 | 6.43 | 45.95 | 8.58 |
| AD-1134978.1 | 1.83 | 1.20 | 3.51 | 1.22 | 8.02 | 2.02 | 17.91 | 5.45 |
| AD-1134979.1 | 6.07 | 2.30 | 8.15 | 3.14 | 24.69 | 8.69 | 57.44 | 17.16 |
| AD-1134980.1 | 2.94 | 3.56 | 4.06 | 1.43 | 9.34 | 3.28 | 19.86 | 6.30 |
| AD-1134981.1 | 0.74 | 0.30 | 5.03 | 0.15 | 7.73 | 1.62 | 27.87 | 7.17 |
| AD-1134982.1 | 2.37 | 0.78 | 3.49 | 1.13 | 5.78 | 1.54 | 24.37 | 3.31 |
| AD-1134983.1 | 5.24 | 3.02 | 8.60 | 2.50 | 35.63 | 9.34 | 63.89 | 6.64 |
| AD-1134984.1 | 6.05 | 5.00 | 4.90 | 0.52 | 12.73 | 2.26 | 38.25 | 7.70 |
| AD-1134985.1 | 2.43 | 2.21 | 3.48 | 1.02 | 14.21 | 2.58 | 30.15 | 7.15 |
| AD-1134986.1 | 1.49 | 0.91 | 3.43 | 1.86 | 11.10 | 5.13 | 21.03 | 4.22 |
| AD-1134987.1 | 4.15 | 4.14 | 5.05 | 4.00 | 21.23 | 5.09 | 41.67 | 13.56 |
| AD-1134988.1 | 3.00 | 3.94 | 2.82 | 1.77 | 8.27 | 3.58 | 19.12 | 9.53 |
| AD-1134989.1 | 2.85 | 1.52 | 3.17 | 1.04 | 10.05 | 5.24 | 36.81 | 12.84 |
| AD-1134990.1 | 7.61 | 4.89 | 9.07 | 2.32 | 34.61 | 10.58 | 63.48 | 7.99 |
| AD-1134991.1 | 50.22 | 19.64 | 49.12 | 6.25 | 101.71 | 17.49 | 136.51 | 23.16 |
| AD-1134992.1 | 2.41 | 0.93 | 3.45 | 1.46 | 15.51 | 6.88 | 31.13 | 8.62 |
| AD-1134993.1 | 7.95 | 3.63 | 11.19 | 1.82 | 41.88 | 9.00 | 77.13 | 21.75 |
| AD-1134994.1 | 2.39 | 1.08 | 6.06 | 1.49 | 18.85 | 0.59 | 43.13 | 18.95 |
| AD-1134995.1 | 11.15 | 5.70 | 23.39 | 2.85 | 47.27 | 10.06 | 85.90 | 29.94 |
| AD-1134996.1 | 0.71 | 0.24 | 2.29 | 0.53 | 4.15 | 1.38 | 20.18 | 2.40 |
| AD-1134997.1 | 7.40 | 2.06 | 13.11 | 9.24 | 46.61 | 12.33 | 98.20 | 30.88 |
| AD-823016.4 | 1.63 | 1.07 | 3.43 | 0.82 | 10.39 | 1.89 | 19.72 | 4.88 |
| AD-1134998.1 | 3.90 | 1.52 | 4.25 | 1.51 | 12.24 | 2.79 | 41.32 | 8.36 |
| AD-1134999.1 | 1.89 | 0.85 | 4.03 | 1.08 | 12.44 | 5.35 | 22.17 | 1.79 |
| AD-1135000.1 | 1.27 | 0.41 | 3.16 | 1.17 | 6.73 | 1.22 | 13.45 | 3.19 |
| AD-1135001.1 | 0.78 | 0.28 | 3.62 | 2.05 | 4.48 | 2.84 | 14.71 | 10.28 |
| AD-1135002.1 | 1.10 | 0.68 | 6.28 | 2.10 | 4.86 | 2.89 | 19.69 | 13.10 |
| AD-1135003.1 | 2.99 | 0.31 | 2.61 | 0.98 | 6.32 | 4.89 | 19.24 | 3.86 |
| AD-1135004.1 | 1.89 | 1.61 | 2.40 | 0.51 | 3.69 | 1.66 | 15.45 | 1.46 |
| AD-1135005.1 | 1.12 | 0.64 | 1.71 | 0.57 | 3.08 | 1.31 | 11.95 | 4.45 |
| AD-1135006.1 | 1.78 | 0.13 | 3.93 | 1.25 | 12.12 | 5.53 | 28.83 | 2.03 |
| AD-1135007.1 | 0.84 | 0.26 | 2.45 | 0.90 | 4.56 | 2.41 | 16.49 | 5.07 |
| AD-1135008.1 | 1.43 | 0.60 | 2.20 | 0.48 | 2.28 | 1.00 | 11.78 | 2.20 |
| AD-1135009.1 | 0.98 | 0.62 | 2.02 | 0.81 | 2.19 | 1.09 | 7.28 | 4.01 |

### Example 4. In Vivo Screening of dsRNA Duplexes in Mice

[0776] Duplexes of interest, identified from the above in vitro studies, were evaluated in vivo. In particular, at pre-dose day −14 wild-type mice (C57BL/6) were transduced by intravenous administration of 2×10¹¹ viral particles of an adeno-associated virus 8 (AAV8) vector encoding human TTR. In particular, mice were administered an AAV8 encoding human TTR.

[0777] At day 0, groups of three mice were subcutaneously administered a single 1 mg/kg dose of the agents of interest or PBS control. At day 7 post-dose animals were sacrificed, liver samples were collected and snap-frozen in liquid nitrogen. Tissue mRNA was extracted and analyzed by the RT-QPCR method.

[0778] Human TTR mRNA levels were compared to housekeeping gene GAPDH. The values were then normalized to the average of PBS vehicle control group. The data were expressed as percent of baseline value, and presented as mean plus standard deviation. The results, shown in FIG. 1, demonstrate that the exemplary duplex agents tested potently reduce the level of the human TTR messenger RNA in vivo.

### Example 5. In Vivo Screening of dsRNA Duplexes in Cynomolgus Monkeys

[0779] Duplexes of interest, identified from the above mouse studies, were evaluated in cynomolgus monkey. Animals (N=3 per group) received a single 0.5 mg/kg subcutaneous dose of a dsRNA agent (AD-649263, AD-1134938, AD-649264, AD-1134966, or AD-65496) on day 1.

[0780] AD-65496, previously identified as a dsRNA agent that potently and durably inhibits human TTR mRNA and protein, was used as a comparator. The modified nucleotide sequence of the sense strand of AD-65496 is 5′-usgsggauUfuCfAfUfguaaccaaga-3′ and the modified nucleotide sequence of the antisense strand of AD-65496 is 5′-VPusCfsuugGfuuAfcaugAfaAfucccasusc-3′.

[0781] Blood was obtained on days −8, 0, 8, 15, 20, 29, 36, 43, 50, 64, 78, and 92 post-dose. TTR mRNA levels were determined as described above. Data were expressed as percent of baseline value, and presented as mean plus/minus standard deviation. The results are shown in FIG. 2.

[0782] The data demonstrate that subcutaneous administration of a single 0.5 mg/kg dose of AD-649263, AD-1134938, AD-649264, AD-1134966, or AD-65496 potently and durably inhibits TTR mRNA. The data also demonstrate that the knockdown of TTR mRNA following subcutaneous administration of a single 0.5 mg/kg dose of AD-1134966 or AD-649264 is similar to the knockdown and duration knockdown of TTR observed with the previously evaluated duplex, AD-65496. In addition, the data demonstrate that the knockdown of TTR mRNA following subcutaneous administration of a single 0.5 mg/kg dose of AD-1134938 or AD-1134966 is similar to the knockdown observed with each respective parent duplex (AD-649263 or AD-649264). The data also demonstrate that AD-649264 is more potent than AD-649263 in vivo, recapitulating the data obtained in the AAV experiments described in Example 4.

### EQUIVALENTS

[0783] Those skilled in the art will recognize, or be able to ascertain using no more than routine experimentation, many equivalents to the specific embodiments and methods described herein. Such equivalents are intended to be encompassed by the scope of the following claims.

Informal Sequence Listing
>NM_000371.4 Homo sapiens
transthyretin (TTR), mRNA
SEQ ID NO: 1
ACAGAAGTCCACTCATTCTTGGCAGGATGGCTTCTC
ATCGTCTGCTCCTCCTCTGCCTTGCTGGACTGGTAT
TTGTGTCTGAGGCTGGCCCTACGGGCACCGGTGAAT
CCAAGTGTCCTCTGATGGTCAAAGTTCTAGATGCTG
TCCGAGGCAGTCCTGCCATCAATGTGGCCGTGCATG
TGTTCAGAAAGGCTGCTGATGACACCTGGGAGCCAT
TTGCCTCTGGGAAAACCAGTGAGTCTGGAGAGCTGC
ATGGGCTCACAACTGAGGAGGAATTTGTAGAAGGGA
TATACAAAGTGGAAATAGACACCAAATCTTACTGGA
AGGCACTTGGCATCTCCCCATTCCATGAGCATGCAG
AGGTGGTATTCACAGCCAACGACTCCGGCCCCCGCC
GCTACACCATTGCCGCCCTGCTGAGCCCCTACTCCT
ATTCCACCACGGCTGTCGTCACCAATCCCAAGGAAT
GAGGGACTTCTCCTCCAGTGGACCTGAAGGACGAGG
GATGGGATTTCATGTAACCAAGAGTATTCCATTTTT
ACTAAAGCAGTGTTTTCACCTCATATGCTATGTTAG
AAGTCCAGGCAGAGACAATAAAACATTCCTGTGAAA
GGCA
>NM_013697.2 Mus musculus
transthyretin (Ttr), mRNA
SEQ ID NO: 2
ACACAGATCCACAAGCTCCTGACAGGATGGCTTCCC
TTCGACTCTTCCTCCTTTGCCTCGCTGGACTGGTAT
TTGTGTCTGAAGCTGGCCCCGCGGGTGCTGGAGAAT
CCAAATGTCCTCTGATGGTCAAAGTCCTGGATGCTG
TCCGAGGCAGCCCTGCTGTAGACGTGGCTGTAAAAG
TGTTCAAAAAGACCTCTGAGGGATCCTGGGAGCCCT
TTGCCTCTGGGAAGACCGCGGAGTCTGGAGAGCTGC
ACGGGCTCACCACAGATGAGAAGTTTGTAGAAGGAG
TGTACAGAGTAGAACTGGACACCAAATCGTACTGGA
AGACACTTGGCATTTCCCCGTTCCATGAATTCGCGG
ATGTGGTTTTCACAGCCAACGACTCTGGCCATCGCC
ACTACACCATCGCAGCCCTGCTCAGCCCATACTCCT
ACAGCACCACGGCTGTCGTCAGCAACCCCCAGAATT
GAGAGACTCAGCCCAGGAGGACCAGGATCTTGCCAA
AGCAGTAGCATCCCATTTGTACCAAAACAGTGTTCT
TGCTCTATAAACCGTGTTAGCAGCTCAGGAAGATGC
CGTGAAGCATTCTTATTAAACCACCTGCTATTTCAT
TCAAACTGTGTTTCTTTTTTATTTCCTCATTTTTCT
CCCCTGCTCCTAAAACCCAAAATTTTTTAAAGAATT
CTAGAAGGTATGCGATCAAACTTTTTAAAGAAAGAA
AATACTTTTTGACTCATGGTTTAAAGGCATCCTTTC
CATCTTGGGGAGGTCATGGGTGCTCCTGGCAACTTG
CTTGAGGAAGATAGGTCAGAAAGCAGAGTGGACCAA
CCGTTCAATGTTTTACAAGCAAAACATACACTAACA
TGGTCTGTAGCTATTAAAAGCACACAATCTGAAGGG
CTGTAGATGCACAGTAGTGTTTTCCCAGAGCATGTT
CAAAAGCCCTGGGTTCAATCACAATACTGAAAAGTA
GGCCAAAAAACATTCTGAAAATGAAATATTTGGGTT
TTTTTTTATAACCTTTAGTGACTAAATAAAGCCAAA
TCTAGG
>NM_012681.1 Rattus norvegicus
transthyretin (Ttr), mRNA
SEQ ID NO: 3
CCTGACAGGATGGCTTCCCTTCGCCTGTTCCTCCTC
TGCCTCGCTGGACTGATATTTGCGTCTGAAGCTGGC
CCTGGGGGTGCTGGAGAATCCAAGTGTCCTCTGATG
GTCAAAGTCCTGGATGCTGTCCGAGGCAGCCCTGCT
GTCGATGTGGCCGTGAAAGTGTTCAAAAGGACTGCA
GACGGAAGCTGGGAGCCGTTTGCCTCTGGGAAGACC
GCCGAGTCTGGAGAGCTGCACGGGCTCACCACAGAT
GAGAAGTTCACGGAAGGGGTGTACAGGGTAGAACTG
GACACCAAATCATACTGGAAGGCTCTTGGCATTTCC
CCATTCCATGAATACGCAGAGGTGGTTTTCACAGCC
AATGACTCTGGTCATCGCCACTACACCATCGCAGCC
CTGCTCAGCCCGTACTCCTACAGCACCACTGCTGTC
GTCAGTAACCCCCAGAACTGAGGGACCCAGCCCACG
AGGACCAAGATCTTGCCAAAGCAGTAGCTCCCATTT
GTACTGAAACAGTGTTCTTGCTCTATAAACCGTGTT
AGCAACTCGGGAAGATGCCGTGAAACGTTCTTATTA
AACCACCTTTATTTCATTC
>NM_001283593.1 Macaca fascicularis
transthyretin (TTR), mRNA
SEQ ID NO: 4
GCAGGATGGCTTCTCATCGTCTGCTCCTCCTCTGCC
TCGCTGGACTGGTATTTGTGTCTGAGGCTGGTCCTA
CGGGCGTTGATGAATCCAAGTGTCCTCTGATGGTCA
AAGTTCTAGATGCCGTCCGAGGCAGTCCTGCTGTCA
ATGTGGCTGTGAACGTGTTCAAAAAGGCTGCTGATG
AGACCTGGGCGCCATTTGCCTCTGGGAAAACCAGTG
AGTCTGGAGAGCTGCATGGGCTCACAACTGAGGAGG
AATTTGTAGAAGGGATATACAAAGTGGAAATAGACA
CCAAATCTTACTGGAAGTCACTTGGCATCTCCCCAT
TCCATGAGCATGCAGAGGTGGTATTCACAGCCAACG
ATTCCGGCCCCCGCCACTACACCATCGCCGCCCTGC
TGAGCCCCTACTCCTATTCCACCACGGCTGTCGTCA
CCAATCCCAAGGAATGAGGGACTTCTCCAGAGGATC
TGAAGGACGAG
>NM_001261679.1 Macaca mulatta
transthyretin (TTR), mRNA
SEQ ID NO: 5
GAATCAGCAGGTTTGGAGTCAGATTGGCAGGGATAA
GCAGCCTAGCTCAGGAGAAGTGGGTATAAAAGCCCC
AGGCTGGGAGCAGCCATCACAGAAGTCCACTCGTTC
TTGGCAGGATGGCTTCTCATCGTCTGCTCCTCCTCT
GCCTCGCTGGACTGGTATTTGTGTCTGAGGCTGGTC
CTACGGGCGTTGATGAATCCAAGTGTCCTCTGATGG
TCAAAGTTCTAGATGCCGTCCGAGGCAGTCCTGCTG
TCAATGTGGCTGTGAACGTGTTCAAAAAGGCTGCTG
ATGAGACCTGGGCGCCATTTGCCTCTGGGAAAACCA
GTGAGTCTGGAGAGCTGCATGGGCTCACAACTGAGG
AGGAATTTGTAGAAGGGATATACAAAGTGGAAATAG
ACACCAAATCTTACTGGAAGTCACTTGGCATCTCCC
CATTCCATGAGCATGCAGAGGTGGTATTCACAGCCA
ACGATTCCGGCCCCCGCCACTACACCATCGCCGCCC
TGCTGAGCCCCTACTCCTATTCCACCACGGCTGTCG
TCACCAATCCCAAGGAATGAGGGACTTCTCCAGAGG
ATCTGAAGGACGAGGGATGGGATTTCATGTAACCAA
GAGTATTCCATTTTTACTAAAGCAGTGTTTTCACCT
CATAAGCTATGTTAGGAGTCCAGGCAGAGACAATAA
AACATTCCTGTGAAAGGCAAA
Reverse Complement of SEQ ID NO: 1
SEQ ID NO: 6
TGCCTTTCACAGGAATGTTTTATTGTCTCTGCCTGG
ACTTCTAACATAGCATATGAGGTGAAAACACTGCTT
TAGTAAAAATGGAATACTCTTGGTTACATGAAATCC
CATCCCTCGTCCTTCAGGTCCACTGGAGGAGAAGTC
CCTCATTCCTTGGGATTGGTGACGACAGCCGTGGTG
GAATAGGAGTAGGGGCTCAGCAGGGCGGCAATGGTG
TAGCGGCGGGGGCCGGAGTCGTTGGCTGTGAATACC
ACCTCTGCATGCTCATGGAATGGGGAGATGCCAAGT
GCCTTCCAGTAAGATTTGGTGTCTATTTCCACTTTG
TATATCCCTTCTACAAATTCCTCCTCAGTTGTGAGC
CCATGCAGCTCTCCAGACTCACTGGTTTTCCCAGAG
GCAAATGGCTCCCAGGTGTCATCAGCAGCCTTTCTG
AACACATGCACGGCCACATTGATGGCAGGACTGCCT
CGGACAGCATCTAGAACTTTGACCATCAGAGGACAC
TTGGATTCACCGGTGCCCGTAGGGCCAGCCTCAGAC
ACAAATACCAGTCCAGCAAGGCAGAGGAGGAGCAGA
CGATGAGAAGCCATCCTGCCAAGAATGAGTGGACTT
CTGT
Reverse Complement of SEQ ID NO: 2
SEQ ID NO: 7
CCTAGATTTGGCTTTATTTAGTCACTAAAGGTTATA
AAAAAAAACCCAAATATTTCATTTTCAGAATGTTTT
TTGGCCTACTTTTCAGTATTGTGATTGAACCCAGGG
CTTTTGAACATGCTCTGGGAAAACACTACTGTGCAT
CTACAGCCCTTCAGATTGTGTGCTTTTAATAGCTAC
AGACCATGTTAGTGTATGTTTTGCTTGTAAAACATT
GAACGGTTGGTCCACTCTGCTTTCTGACCTATCTTC
CTCAAGCAAGTTGCCAGGAGCACCCATGACCTCCCC
AAGATGGAAAGGATGCCTTTAAACCATGAGTCAAAA
AGTATTTTCTTTCTTTAAAAAGTTTGATCGCATACC
TTCTAGAATTCTTTAAAAAATTTTGGGTTTTAGGAG
CAGGGGAGAAAAATGAGGAAATAAAAAAGAAACACA
GTTTGAATGAAATAGCAGGTGGTTTAATAAGAATGC
TTCACGGCATCTTCCTGAGCTGCTAACACGGTTTAT
AGAGCAAGAACACTGTTTTGGTACAAATGGGATGCT
ACTGCTTTGGCAAGATCCTGGTCCTCCTGGGCTGAG
TCTCTCAATTCTGGGGGTTGCTGACGACAGCCGTGG
TGCTGTAGGAGTATGGGCTGAGCAGGGCTGCGATGG
TGTAGTGGCGATGGCCAGAGTCGTTGGCTGTGAAAA
CCACATCCGCGAATTCATGGAACGGGGAAATGCCAA
GTGTCTTCCAGTACGATTTGGTGTCCAGTTCTACTC
TGTACACTCCTTCTACAAACTTCTCATCTGTGGTGA
GCCCGTGCAGCTCTCCAGACTCCGCGGTCTTCCCAG
AGGCAAAGGGCTCCCAGGATCCCTCAGAGGTCTTTT
TGAACACTTTTACAGCCACGTCTACAGCAGGGCTGC
CTCGGACAGCATCCAGGACTTTGACCATCAGAGGAC
ATTTGGATTCTCCAGCACCCGCGGGGCCAGCTTCAG
ACACAAATACCAGTCCAGCGAGGCAAAGGAGGAAGA
GTCGAAGGGAAGCCATCCTGTCAGGAGCTTGTGGAT
CTGTGT
Reverse Complement of SEQ ID NO: 3
SEQ ID NO: 8
GAATGAAATAAAGGTGGTTTAATAAGAACGTTTCAC
GGCATCTTCCCGAGTTGCTAACACGGTTTATAGAGC
AAGAACACTGTTTCAGTACAAATGGGAGCTACTGCT
TTGGCAAGATCTTGGTCCTCGTGGGCTGGGTCCCTC
AGTTCTGGGGGTTACTGACGACAGCAGTGGTGCTGT
AGGAGTACGGGCTGAGCAGGGCTGCGATGGTGTAGT
GGCGATGACCAGAGTCATTGGCTGTGAAAACCACCT
CTGCGTATTCATGGAATGGGGAAATGCCAAGAGCCT
TCCAGTATGATTTGGTGTCCAGTTCTACCCTGTACA
CCCCTTCCGTGAACTTCTCATCTGTGGTGAGCCCGT
GCAGCTCTCCAGACTCGGCGGTCTTCCCAGAGGCAA
ACGGCTCCCAGCTTCCGTCTGCAGTCCTTTTGAACA
CTTTCACGGCCACATCGACAGCAGGGCTGCCTCGGA
CAGCATCCAGGACTTTGACCATCAGAGGACACTTGG
ATTCTCCAGCACCCCCAGGGCCAGCTTCAGACGCAA
ATATCAGTCCAGCGAGGCAGAGGAGGAACAGGCGAA
GGGAAGCCATCCTGTCAGG
Reverse Complement of SEQ ID NO: 4
SEQ ID NO: 9
CTCGTCCTTCAGATCCTCTGGAGAAGTCCCTCATTC
CTTGGGATTGGTGACGACAGCCGTGGTGGAATAGGA
GTAGGGGCTCAGCAGGGCGGCGATGGTGTAGTGGCG
GGGGCCGGAATCGTTGGCTGTGAATACCACCTCTGC
ATGCTCATGGAATGGGGAGATGCCAAGTGACTTCCA
GTAAGATTTGGTGTCTATTTCCACTTTGTATATCCC
TTCTACAAATTCCTCCTCAGTTGTGAGCCCATGCAG
CTCTCCAGACTCACTGGTTTTCCCAGAGGCAAATGG
CGCCCAGGTCTCATCAGCAGCCTTTTTGAACACGTT
CACAGCCACATTGACAGCAGGACTGCCTCGGACGGC
ATCTAGAACTTTGACCATCAGAGGACACTTGGATTC
ATCAACGCCCGTAGGACCAGCCTCAGACACAAATAC
CAGTCCAGCGAGGCAGAGGAGGAGCAGACGATGAGA
AGCCATCCTGC
Reverse Complement of SEQ ID NO: 5
SEQ ID NO: 10
TTTGCCTTTCACAGGAATGTTTTATTGTCTCTGCCT
GGACTCCTAACATAGCTTATGAGGTGAAAACACTGC
TTTAGTAAAAATGGAATACTCTTGGTTACATGAAATC
CCATCCCTCGTCCTTCAGATCCTCTGGAGAAGTCCCT
CATTCCTTGGGATTGGTGACGACAGCCGTGGTGGAAT
AGGAGTAGGGGCTCAGCAGGGCGGCGATGGTGTAGT
GGCGGGGGCCGGAATCGTTGGCTGTGAATACCACCT
CTGCATGCTCATGGAATGGGGAGATGCCAAGTGACT
TCCAGTAAGATTTGGTGTCTATTTCCACTTTGTATA
TCCCTTCTACAAATTCCTCCTCAGTTGTGAGCCCAT
GCAGCTCTCCAGACTCACTGGTTTTCCCAGAGGCAA
ATGGCGCCCAGGTCTCATCAGCAGCCTTTTTGAACA
CGTTCACAGCCACATTGACAGCAGGACTGCCTCGGA
CGGCATCTAGAACTTTGACCATCAGAGGACACTTGG
ATTCATCAACGCCCGTAGGACCAGCCTCAGACACAA
ATACCAGTCCAGCGAGGCAGAGGAGGAGCAGACGAT
GAGAAGCCATCCTGCCAAGAACGAGTGGACTTCTGT
GATGGCTGCTCCCAGCCTGGGGCTTTTATACCCACT
TCTCCTGAGCTAGGCTGCTTATCCCTGCCAATCTGA
CTCCAAACCTGCTGATTC

The application's sequence listing, which the Patent Office published only in electronic form, follows.

SEQUENCE LISTING (1382 sequences)

SEQ ID NO: 1 - DNA, 616 bp, Homo sapiens
  source 1..616: mol_type = genomic DNA
acagaagtccactcattcttggcaggatggcttctcatcgtctgctcctcctctgccttgctggactggtatttgtgtctgaggctggccctacgggcaccggtgaatccaagtgtcctctgatggtcaaagttctagatgctgtccgaggcagtcctgccatcaatgtggccgtgcatgtgttcagaaaggctgctgatgacacctgggagccatttgcctctgggaaaaccagtgagtctggagagctgcatgggctcacaactgaggaggaatttgtagaagggatatacaaagtggaaatagacaccaaatcttactggaaggcacttggcatctccccattccatgagcatgcagaggtggtattcacagccaacgactccggcccccgccgctacaccattgccgccctgctgagcccctactcctattccaccacggctgtcgtcaccaatcccaaggaatgagggacttctcctccagtggacctgaaggacgagggatgggatttcatgtaaccaagagtattccatttttactaaagcagtgttttcacctcatatgctatgttagaagtccaggcagagacaataaaacattcctgtgaaaggca

SEQ ID NO: 2 - DNA, 1050 bp, Mus musculus
  source 1..1050: mol_type = genomic DNA
acacagatccacaagctcctgacaggatggcttcccttcgactcttcctcctttgcctcgctggactggtatttgtgtctgaagctggccccgcgggtgctggagaatccaaatgtcctctgatggtcaaagtcctggatgctgtccgaggcagccctgctgtagacgtggctgtaaaagtgttcaaaaagacctctgagggatcctgggagccctttgcctctgggaagaccgcggagtctggagagctgcacgggctcaccacagatgagaagtttgtagaaggagtgtacagagtagaactggacaccaaatcgtactggaagacacttggcatttccccgttccatgaattcgcggatgtggttttcacagccaacgactctggccatcgccactacaccatcgcagccctgctcagcccatactcctacagcaccacggctgtcgtcagcaacccccagaattgagagactcagcccaggaggaccaggatcttgccaaagcagtagcatcccatttgtaccaaaacagtgttcttgctctataaaccgtgttagcagctcaggaagatgccgtgaagcattcttattaaaccacctgctatttcattcaaactgtgtttcttttttatttcctcatttttctcccctgctcctaaaacccaaaattttttaaagaattctagaaggtatgcgatcaaactttttaaagaaagaaaatactttttgactcatggtttaaaggcatcctttccatcttggggaggtcatgggtgctcctggcaacttgcttgaggaagataggtcagaaagcagagtggaccaaccgttcaatgttttacaagcaaaacatacactaacatggtctgtagctattaaaagcacacaatctgaagggctgtagatgcacagtagtgttttcccagagcatgttcaaaagccctgggttcaatcacaatactgaaaagtaggccaaaaaacattctgaaaatgaaatatttgggtttttttttataacctttagtgactaaataaagccaaatctagg

SEQ ID NO: 3 - DNA, 595 bp, Rattus norvegicus
  source 1..595: mol_type = genomic DNA
cctgacaggatggcttcccttcgcctgttcctcctctgcctcgctggactgatatttgcgtctgaagctggccctgggggtgctggagaatccaagtgtcctctgatggtcaaagtcctggatgctgtccgaggcagccctgctgtcgatgtggccgtgaaagtgttcaaaaggactgcagacggaagctgggagccgtttgcctctgggaagaccgccgagtctggagagctgcacgggctcaccacagatgagaagttcacggaaggggtgtacagggtagaactggacaccaaatcatactggaaggctcttggcatttccccattccatgaatacgcagaggtggttttcacagccaatgactctggtcatcgccactacaccatcgcagccctgctcagcccgtactcctacagcaccactgctgtcgtcagtaacccccagaactgagggacccagcccacgaggaccaagatcttgccaaagcagtagctcccatttgtactgaaacagtgttcttgctctataaaccgtgttagcaactcgggaagatgccgtgaaacgttcttattaaaccacctttatttcattc

SEQ ID NO: 4 - DNA, 479 bp, Macaca fascicularis
  source 1..479: mol_type = genomic DNA
gcaggatggcttctcatcgtctgctcctcctctgcctcgctggactggtatttgtgtctgaggctggtcctacgggcgttgatgaatccaagtgtcctctgatggtcaaagttctagatgccgtccgaggcagtcctgctgtcaatgtggctgtgaacgtgttcaaaaaggctgctgatgagacctgggcgccatttgcctctgggaaaaccagtgagtctggagagctgcatgggctcacaactgaggaggaatttgtagaagggatatacaaagtggaaatagacaccaaatcttactggaagtcacttggcatctccccattccatgagcatgcagaggtggtattcacagccaacgattccggcccccgccactacaccatcgccgccctgctgagcccctactcctattccaccacggctgtcgtcaccaatcccaaggaatgagggacttctccagaggatctgaaggacgag

SEQ ID NO: 5 - DNA, 705 bp, Macaca mulatta
  source 1..705: mol_type = genomic DNA
gaatcagcaggtttggagtcagattggcagggataagcagcctagctcaggagaagtgggtataaaagccccaggctgggagcagccatcacagaagtccactcgttcttggcaggatggcttctcatcgtctgctcctcctctgcctcgctggactggtatttgtgtctgaggctggtcctacgggcgttgatgaatccaagtgtcctctgatggtcaaagttctagatgccgtccgaggcagtcctgctgtcaatgtggctgtgaacgtgttcaaaaaggctgctgatgagacctgggcgccatttgcctctgggaaaaccagtgagtctggagagctgcatgggctcacaactgaggaggaatttgtagaagggatatacaaagtggaaatagacaccaaatcttactggaagtcacttggcatctccccattccatgagcatgcagaggtggtattcacagccaacgattccggcccccgccactacaccatcgccgccctgctgagcccctactcctattccaccacggctgtcgtcaccaatcccaaggaatgagggacttctccagaggatctgaaggacgagggatgggatttcatgtaaccaagagtattccatttttactaaagcagtgttttcacctcataagctatgttaggagtccaggcagagacaataaaacattcctgtgaaaggcaaa

SEQ ID NO: 6 - DNA, 616 bp, Homo sapiens
  source 1..616: mol_type = genomic DNA
tgcctttcacaggaatgttttattgtctctgcctggacttctaacatagcatatgaggtgaaaacactgctttagtaaaaatggaatactcttggttacatgaaatcccatccctcgtccttcaggtccactggaggagaagtccctcattccttgggattggtgacgacagccgtggtggaataggagtaggggctcagcagggcggcaatggtgtagcggcgggggccggagtcgttggctgtgaataccacctctgcatgctcatggaatggggagatgccaagtgccttccagtaagatttggtgtctatttccactttgtatatcccttctacaaattcctcctcagttgtgagcccatgcagctctccagactcactggttttcccagaggcaaatggctcccaggtgtcatcagcagcctttctgaacacatgcacggccacattgatggcaggactgcctcggacagcatctagaactttgaccatcagaggacacttggattcaccggtgcccgtagggccagcctcagacacaaataccagtccagcaaggcagaggaggagcagacgatgagaagccatcctgccaagaatgagtggacttctgt

SEQ ID NO: 7 - DNA, 1050 bp, Mus musculus
  source 1..1050: mol_type = genomic DNA
cctagatttggctttatttagtcactaaaggttataaaaaaaaacccaaatatttcattttcagaatgttttttggcctacttttcagtattgtgattgaacccagggcttttgaacatgctctgggaaaacactactgtgcatctacagcccttcagattgtgtgcttttaatagctacagaccatgttagtgtatgttttgcttgtaaaacattgaacggttggtccactctgctttctgacctatcttcctcaagcaagttgccaggagcacccatgacctccccaagatggaaaggatgcctttaaaccatgagtcaaaaagtattttctttctttaaaaagtttgatcgcataccttctagaattctttaaaaaattttgggttttaggagcaggggagaaaaatgaggaaataaaaaagaaacacagtttgaatgaaatagcaggtggtttaataagaatgcttcacggcatcttcctgagctgctaacacggtttatagagcaagaacactgttttggtacaaatgggatgctactgctttggcaagatcctggtcctcctgggctgagtctctcaattctgggggttgctgacgacagccgtggtgctgtaggagtatgggctgagcagggctgcgatggtgtagtggcgatggccagagtcgttggctgtgaaaaccacatccgcgaattcatggaacggggaaatgccaagtgtcttccagtacgatttggtgtccagttctactctgtacactccttctacaaacttctcatctgtggtgagcccgtgcagctctccagactccgcggtcttcccagaggcaaagggctcccaggatccctcagaggtctttttgaacacttttacagccacgtctacagcagggctgcctcggacagcatccaggactttgaccatcagaggacatttggattctccagcacccgcggggccagcttcagacacaaataccagtccagcgaggcaaaggaggaagagtcgaagggaagccatcctgtcaggagcttgtggatctgtgt

SEQ ID NO: 8 - DNA, 595 bp, Rattus norvegicus
  source 1..595: mol_type = genomic DNA
gaatgaaataaaggtggtttaataagaacgtttcacggcatcttcccgagttgctaacacggtttatagagcaagaacactgtttcagtacaaatgggagctactgctttggcaagatcttggtcctcgtgggctgggtccctcagttctgggggttactgacgacagcagtggtgctgtaggagtacgggctgagcagggctgcgatggtgtagtggcgatgaccagagtcattggctgtgaaaaccacctctgcgtattcatggaatggggaaatgccaagagccttccagtatgatttggtgtccagttctaccctgtacaccccttccgtgaacttctcatctgtggtgagcccgtgcagctctccagactcggcggtcttcccagaggcaaacggctcccagcttccgtctgcagtccttttgaacactttcacggccacatcgacagcagggctgcctcggacagcatccaggactttgaccatcagaggacacttggattctccagcacccccagggccagcttcagacgcaaatatcagtccagcgaggcagaggaggaacaggcgaagggaagccatcctgtcagg

SEQ ID NO: 9 - DNA, 479 bp, Macaca fascicularis
  source 1..479: mol_type = genomic DNA
ctcgtccttcagatcctctggagaagtccctcattccttgggattggtgacgacagccgtggtggaataggagtaggggctcagcagggcggcgatggtgtagtggcgggggccggaatcgttggctgtgaataccacctctgcatgctcatggaatggggagatgccaagtgacttccagtaagatttggtgtctatttccactttgtatatcccttctacaaattcctcctcagttgtgagcccatgcagctctccagactcactggttttcccagaggcaaatggcgcccaggtctcatcagcagcctttttgaacacgttcacagccacattgacagcaggactgcctcggacggcatctagaactttgaccatcagaggacacttggattcatcaacgcccgtaggaccagcctcagacacaaataccagtccagcgaggcagaggaggagcagacgatgagaagccatcctgc

SEQ ID NO: 10 - DNA, 705 bp, Macaca mulatta
  source 1..705: mol_type = genomic DNA
tttgcctttcacaggaatgttttattgtctctgcctggactcctaacatagcttatgaggtgaaaacactgctttagtaaaaatggaatactcttggttacatgaaatcccatccctcgtccttcagatcctctggagaagtccctcattccttgggattggtgacgacagccgtggtggaataggagtaggggctcagcagggcggcgatggtgtagtggcgggggccggaatcgttggctgtgaataccacctctgcatgctcatggaatggggagatgccaagtgacttccagtaagatttggtgtctatttccactttgtatatcccttctacaaattcctcctcagttgtgagcccatgcagctctccagactcactggttttcccagaggcaaatggcgcccaggtctcatcagcagcctttttgaacacgttcacagccacattgacagcaggactgcctcggacggcatctagaactttgaccatcagaggacacttggattcatcaacgcccgtaggaccagcctcagacacaaataccagtccagcgaggcagaggaggagcagacgatgagaagccatcctgccaagaacgagtggacttctgtgatggctgctcccagcctggggcttttatacccacttctcctgagctaggctgcttatccctgccaatctgactccaaacctgctgattc

SEQ ID NO: 11 - RNA, 19 nt, synthetic construct
  modified_base 5: mod_base = OTHER; note = thymine
  misc_feature 1..19: note = Synthetic
  source 1..19: mol_type = other RNA
agagtattccatttttact

SEQ ID NO: 12 - RNA, 21 nt, synthetic construct
  misc_feature 1..21: note = Synthetic
  source 1..21: mol_type = other RNA
agtaaaaatggaatactcttg

SEQ ID NO: 13 - RNA, 21 nt, synthetic construct
  misc_feature 1..21: note = Synthetic
  source 1..21: mol_type = other RNA
caagagtattccatttttact

SEQ ID NO: 14 - protein, 16 aa, synthetic construct
  REGION 1..16: note = Synthetic
AAVALLPAVLLALLAP

SEQ ID NO: 15 - protein, 11 aa, synthetic construct
  REGION 1..11: note = Synthetic
AALLPVLLAAP

SEQ ID NO: 16 - protein, 13 aa, synthetic construct
  REGION 1..13: note = Synthetic
GRKKRRQRRRPPQ

SEQ ID NO: 17 - protein, 16 aa, synthetic construct
  REGION 1..16: note = Synthetic
RQIKIWFQNRRMKWKK

SEQ ID NO: 18 - RNA, 23 nt, synthetic construct
  misc_feature 1..23: note = Synthetic
  source 1..23: mol_type = other RNA
agtaaaaatggaatactcttggt

SEQ ID NO: 19 - RNA, 21 nt, synthetic construct
  misc_feature 1..21: note = Synthetic
  source 1..21: mol_type = other RNA
ccaagagtattccatttttat

SEQ ID NO: 20 - RNA, 23 nt, synthetic construct
  misc_feature 1..23: note = Synthetic
  source 1..23: mol_type = other RNA
ataaaaatggaatactcttggtt

SEQ ID NO: 21 - RNA, 21 nt, synthetic construct
  misc_feature 1..21: note = Synthetic
  modified_base 1: mod_base = OTHER; note = 2'-O-methylcytidine-3'- phosphorothioate
  modified_base 2: mod_base = OTHER; note = 2'-O-methyladenosine-3'- phosphorothioate
  modified_base 7: mod_base = OTHER; note = 2'-fluorouridine-3'-phosphate
  modified_base 9..10: mod_base = OTHER; note = 2'-fluorouridine-3'-phosphate
  modified_base 11: mod_base = OTHER; note = 2'-fluorocytidine-3'-phosphate
  source 1..21: mol_type = other RNA
caagagtattccatttttact

SEQ ID NO: 22 - RNA, 23 nt, synthetic construct
  misc_feature 1..23: note = Synthetic
  modified_base 1: mod_base = OTHER; note = 2'-O-methyladenosine-3'- phosphorothioate
  modified_base 2: mod_base = OTHER; note = 2'-fluoroguanosine-3'-phosphorothioate
  modified_base 6: mod_base = OTHER; note = 2'-fluoroadenosine-3'-phosphate
  modified_base 14: mod_base = OTHER; note = 2'-fluorouridine-3'-phosphate
  modified_base 16: mod_base = OTHER; note = 2'-fluorocytidine-3'-phosphate
  modified_base 21..22: mod_base = OTHER; note = 2'-O-methylguanosine-3'- phosphorothioate
  source 1..23: mol_type = other RNA
agtaaaaatggaatactcttggt

SEQ ID NO: 23 - RNA, 21 nt, synthetic construct
  misc_feature 1..21: note = Synthetic
  modified_base 1: mod_base = OTHER; note = 2'-O-methylcytidine-3'- phosphorothioate
  modified_base 2: mod_base = OTHER; note = 2'-O-methyladenosine-3'- phosphorothioate
  modified_base 7: mod_base = OTHER; note = 2'-fluorouridine-3'-phosphate
  modified_base 9..10: mod_base = OTHER; note = 2'-fluorouridine-3'-phosphate
  modified_base 11: mod_base = OTHER; note = 2'-fluorocytidine-3'-phosphate
  source 1..21: mol_type = other RNA
caagagtattccatttttact

SEQ ID NO: 24 - RNA, 23 nt, synthetic construct
  misc_feature 1..23: note = Synthetic
  modified_base 1: mod_base = OTHER; note = 2'-O-methyladenosine-3'- phosphorothioate
  modified_base 2: mod_base = OTHER; note = 2'-fluoroguanosine-3'-phosphorothioate
  modified_base 6: mod_base = OTHER; note = 2'-fluoroadenosine-3'-phosphate
  modified_base 14: mod_base = OTHER; note = 2'-fluorouridine-3'-phosphate
  modified_base 16: mod_base = OTHER; note = 2'-fluorocytidine-3'-phosphate
  modified_base 21..22: mod_base = OTHER; note = 2'-O-methylguanosine-3'- phosphorothioate
  source 1..23: mol_type = other RNA
agtaaaaatggaatactcttggt

SEQ ID NO: 25 - RNA, 21 nt, synthetic construct
  misc_feature 1..21: note = Synthetic
  modified_base 1: mod_base = OTHER; note = 2'-O-methylcytidine-3'- phosphorothioate
  modified_base 2: mod_base = OTHER; note = 2'-O-methyladenosine-3'- phosphorothioate
  modified_base 7: mod_base = OTHER; note = 2'-fluorouridine-3'-phosphate
  modified_base 9..10: mod_base = OTHER; note = 2'-fluorouridine-3'-phosphate
  modified_base 11: mod_base = OTHER; note = 2'-fluorocytidine-3'-phosphate
  source 1..21: mol_type = other RNA
caagagtattccatttttact

SEQ ID NO: 26 - RNA, 23 nt, synthetic construct
  misc_feature 1..23: note = Synthetic
  modified_base 1: mod_base = OTHER; note = 2'-O-methyladenosine-3'- phosphorothioate
  modified_base 2: mod_base = OTHER; note = 2'-fluoroguanosine-3'-phosphorothioate
  modified_base 6: mod_base = OTHER; note = 2'-fluoroadenosine-3'-phosphate
  modified_base 14: mod_base = OTHER; note = 2'-fluorouridine-3'-phosphate
  modified_base 16: mod_base = OTHER; note = 2'-fluorocytidine-3'-phosphate
  modified_base 21..22: mod_base = OTHER; note = 2'-O-methylguanosine-3'- phosphorothioate
  source 1..23: mol_type = other RNA
agtaaaaatggaatactcttggt

SEQ ID NO: 27 - RNA, 21 nt, synthetic construct
  misc_feature 1..21: note = Synthetic
  modified_base 1: mod_base = OTHER; note = 2'-O-methylcytidine-3'- phosphorothioate
  modified_base 2: mod_base = OTHER; note = 2'-O-methyladenosine-3'- phosphorothioate
  modified_base 7: mod_base = OTHER; note = 2'-fluorouridine-3'-phosphate
  modified_base 9..10: mod_base = OTHER; note = 2'-fluorouridine-3'-phosphate
  modified_base 11: mod_base = OTHER; note = 2'-fluorocytidine-3'-phosphate
  source 1..21: mol_type = other RNA
caagagtattccatttttact

SEQ ID NO: 28 - RNA, 23 nt, synthetic construct
  misc_feature 1..23: note = Synthetic
  modified_base 1: mod_base = OTHER; note = 2'-O-methyladenosine-3'- phosphorothioate
  modified_base 2: mod_base = OTHER; note = 2'-fluoroguanosine-3'-phosphorothioate
  modified_base 6: mod_base = OTHER; note = 2'-fluoroadenosine-3'-phosphate
  modified_base 14: mod_base = OTHER; note = 2'-fluorouridine-3'-phosphate
  modified_base 16: mod_base = OTHER; note = 2'-fluorocytidine-3'-phosphate
  modified_base 21..22: mod_base = OTHER; note = 2'-O-methylguanosine-3'- phosphorothioate
  source 1..23: mol_type = other RNA
agtaaaaatggaatactcttggt

SEQ ID NO: 29 - RNA, 21 nt, synthetic construct
  misc_feature 1..21: note = Synthetic
  modified_base 1: mod_base = OTHER; note = 2'-O-methylcytidine-3'- phosphorothioate
  modified_base 2: mod_base = OTHER; note = 2'-O-methyladenosine-3'- phosphorothioate
  modified_base 7: mod_base = OTHER; note = 2'-fluorouridine-3'-phosphate
  modified_base 9..10: mod_base = OTHER; note = 2'-fluorouridine-3'-phosphate
  modified_base 11: mod_base = OTHER; note = 2'-fluorocytidine-3'-phosphate
  source 1..21: mol_type = other RNA
caagagtattccatttttact

SEQ ID NO: 30 - RNA, 23 nt, synthetic construct
  misc_feature 1..23: note = Synthetic
  modified_base 1: mod_base = OTHER; note = 2'-O-methyladenosine-3'- phosphorothioate
  modified_base 2: mod_base = OTHER; note = 2'-fluoroguanosine-3'-phosphorothioate
  modified_base 6: mod_base = OTHER; note = 2'-fluoroadenosine-3'-phosphate
  modified_base 14: mod_base = OTHER; note = 2'-fluorouridine-3'-phosphate
  modified_base 16: mod_base = OTHER; note = 2'-fluorocytidine-3'-phosphate
  modified_base 21..22: mod_base = OTHER; note = 2'-O-methylguanosine-3'- phosphorothioate
  source 1..23: mol_type = other RNA
agtaaaaatggaatactcttggt

SEQ ID NO: 31 - RNA, 21 nt, synthetic construct
  misc_feature 1..21: note = Synthetic
  modified_base 1: mod_base = OTHER; note = 2'-O-methylcytidine-3'- phosphorothioate
  modified_base 2: mod_base = OTHER; note = 2'-O-methyladenosine-3'- phosphorothioate
  modified_base 7: mod_base = OTHER; note = 2'-fluorouridine-3'-phosphate
  modified_base 9..10: mod_base = OTHER; note = 2'-fluorouridine-3'-phosphate
  modified_base 11: mod_base = OTHER; note = 2'-fluorocytidine-3'-phosphate
  source 1..21: mol_type = other RNA
caagagtattccatttttact

SEQ ID NO: 32 - RNA, 23 nt, synthetic construct
  misc_feature 1..23: note = Synthetic
  modified_base 1: mod_base = OTHER; note = 2'-O-methyladenosine-3'- phosphorothioate
  modified_base 2: mod_base = OTHER; note = 2'-fluoroguanosine-3'-phosphorothioate
  modified_base 6: mod_base = OTHER; note = 2'-fluoroadenosine-3'-phosphate
  modified_base 14: mod_base = OTHER; note = 2'-fluorouridine-3'-phosphate
  modified_base 16: mod_base = OTHER; note = 2'-fluorocytidine-3'-phosphate
  modified_base 21..22: mod_base = OTHER; note = 2'-O-methylguanosine-3'- phosphorothioate
  source 1..23: mol_type = other RNA
agtaaaaatggaatactcttggt

SEQ ID NO: 33 - RNA, 21 nt, synthetic construct
  misc_feature 1..21: note = Synthetic
  modified_base 1: mod_base = OTHER; note = 2'-O-methylcytidine-3'- phosphorothioate
  modified_base 2: mod_base = OTHER; note = 2'-O-methyladenosine-3'- phosphorothioate
  modified_base 7: mod_base = OTHER; note = 2'-fluorouridine-3'-phosphate
  modified_base 9..10: mod_base = OTHER; note = 2'-fluorouridine-3'-phosphate
  modified_base 11: mod_base = OTHER; note = 2'-fluorocytidine-3'-phosphate
  modified_base 21: mod_base = OTHER; note = L96 (N-[tris(GalNAc-alkyl)-amidodecanoyl)]-4-hydroxyprolinol
  source 1..21: mol_type = other RNA
caagagtattccatttttact

SEQ ID NO: 34 - RNA, 23 nt, synthetic construct
  misc_feature 1..23: note = Synthetic
  modified_base 1: mod_base = OTHER; note = 2'-O-methyladenosine-3'- phosphorothioate
  modified_base 2: mod_base = OTHER; note = 2'-fluoroguanosine-3'-phosphorothioate
  modified_base 6: mod_base = OTHER; note = 2'-fluoroadenosine-3'-phosphate
  modified_base 14: mod_base = OTHER; note = 2'-fluorouridine-3'-phosphate
  modified_base 16: mod_base = OTHER; note = 2'-fluorocytidine-3'-phosphate
  modified_base 21..22: mod_base = OTHER; note = 2'-O-methylguanosine-3'- phosphorothioate
  source 1..23: mol_type = other RNA
agtaaaaatggaatactcttggt

SEQ ID NO: 35 - RNA, 21 nt, synthetic construct
  misc_feature 1..21: note = Synthetic
  modified_base 1: mod_base = OTHER; note = 2'-O-methylcytidine-3'- phosphorothioate
  modified_base 2: mod_base = OTHER; note = 2'-O-methyladenosine-3'- phosphorothioate
  modified_base 7: mod_base = OTHER; note = 2'-fluoroguanosine-3'-phosphate
  modified_base 9: mod_base = OTHER; note = 2'-fluoroadenosine-3'-phosphate
  modified_base 10..11: mod_base = OTHER; note = 2'-fluorouridine-3'-phosphate
  source 1..21: mol_type = other RNA
ccaagagtattccatttttat

SEQ ID NO: 36 - RNA, 23 nt, synthetic construct
  misc_feature 1..23: note = Synthetic
  modified_base 1: mod_base = OTHER; note = 2'-O-methyladenosine-3'- phosphorothioate
  modified_base 2: mod_base = OTHER; note = 2'-fluorouridine-3'-phosphate
  modified_base 6: mod_base = OTHER; note = 2'-fluoroadenosine-3'-phosphate
  modified_base 14: mod_base = OTHER; note = 2'-fluoroadenosine-3'-phosphate
  modified_base 16: mod_base = OTHER; note = 2'-fluorouridine-3'-phosphate
  modified_base 21: mod_base = OTHER; note = 2'-O-methylguanosine-3'- phosphorothioate
  modified_base 22: mod_base = OTHER; note = 2'-O-methyluridine-3'-phosphorothioate
  source 1..23: mol_type = other RNA
ataaaaatggaatactcttggtt

SEQ ID NO: 37 - RNA, 21 nt, synthetic construct
  misc_feature 1..21: note = Synthetic
  modified_base 1: mod_base = OTHER; note = 2'-O-methylcytidine-3'- phosphorothioate
  modified_base 2: mod_base = OTHER; note = 2'-O-methyladenosine-3'- phosphorothioate
  modified_base 7: mod_base = OTHER; note = 2'-fluoroguanosine-3'-phosphate
  modified_base 9: mod_base = OTHER; note = 2'-fluoroadenosine-3'-phosphate
  modified_base 10..11: mod_base = OTHER; note = 2'-fluorouridine-3'-phosphate
  source 1..21: mol_type = other RNA
ccaagagtattccatttttat

SEQ ID NO: 38 - RNA, 23 nt, synthetic construct
  misc_feature 1..23: note = Synthetic
  modified_base 1: mod_base = OTHER; note = 2'-O-methyladenosine-3'- phosphorothioate
  modified_base 2: mod_base = OTHER; note = 2'-fluorouridine-3'-phosphate
  modified_base 6: mod_base = OTHER; note = 2'-fluoroadenosine-3'-phosphate
  modified_base 14: mod_base = OTHER; note = 2'-fluoroadenosine-3'-phosphate
  modified_base 16: mod_base = OTHER; note = 2'-fluorouridine-3'-phosphate
  modified_base 21: mod_base = OTHER; note = 2'-O-methylguanosine-3'- phosphorothioate
  modified_base 22: mod_base = OTHER; note = 2'-O-methyluridine-3'-phosphorothioate
  source 1..23: mol_type = other RNA
ataaaaatggaatactcttggtt

SEQ ID NO: 39 - RNA, 21 nt, synthetic construct
  misc_feature 1..21: note = Synthetic
  modified_base 1: mod_base = OTHER; note = 2'-O-methylcytidine-3'- phosphorothioate
  modified_base 2: mod_base = OTHER; note = 2'-O-methyladenosine-3'- phosphorothioate
  modified_base 7: mod_base = OTHER; note = 2'-fluoroguanosine-3'-phosphate
  modified_base 9: mod_base = OTHER; note = 2'-fluoroadenosine-3'-phosphate
  modified_base 10..11: mod_base = OTHER; note = 2'-fluorouridine-3'-phosphate
  source 1..21: mol_type = other RNA
ccaagagtattccatttttat

SEQ ID NO: 40 - RNA, 23 nt, synthetic construct
  misc_feature 1..23: note = Synthetic
  modified_base 1: mod_base = OTHER; note = 2'-O-methyladenosine-3'- phosphorothioate
  modified_base 2: mod_base = OTHER; note = 2'-fluorouridine-3'-phosphate
  modified_base 6: mod_base = OTHER; note = 2'-fluoroadenosine-3'-phosphate
  modified_base 14: mod_base = OTHER; note = 2'-fluoroadenosine-3'-phosphate
  modified_base 16: mod_base = OTHER; note = 2'-fluorouridine-3'-phosphate
  modified_base 21: mod_base = OTHER; note = 2'-O-methylguanosine-3'- phosphorothioate
  modified_base 22: mod_base = OTHER; note = 2'-O-methyluridine-3'-phosphorothioate
  source 1..23: mol_type = other RNA
ataaaaatggaatactcttggtt

SEQ ID NO: 41 - RNA, 21 nt, synthetic construct
  misc_feature 1..21: note = Synthetic
  modified_base 1: mod_base = OTHER; note = 2'-O-methylcytidine-3'- phosphorothioate
  modified_base 2: mod_base = OTHER; note = 2'-O-methyladenosine-3'- phosphorothioate
  modified_base 7: mod_base = OTHER; note = 2'-fluoroguanosine-3'-phosphate
  modified_base 9: mod_base = OTHER; note = 2'-fluoroadenosine-3'-phosphate
  modified_base 10..11: mod_base = OTHER; note = 2'-fluorouridine-3'-phosphate
  source 1..21: mol_type = other RNA
ccaagagtattccatttttat

SEQ ID NO: 42 - RNA, 23 nt, synthetic construct
  misc_feature 1..23: note = Synthetic
  modified_base 1: mod_base = OTHER; note = 2'-O-methyladenosine-3'- phosphorothioate
  modified_base 2: mod_base = OTHER; note = 2'-fluorouridine-3'-phosphate
  modified_base 6: mod_base = OTHER; note = 2'-fluoroadenosine-3'-phosphate
  modified_base 14: mod_base = OTHER; note = 2'-fluoroadenosine-3'-phosphate
  modified_base 16: mod_base = OTHER; note = 2'-fluorouridine-3'-phosphate
  modified_base 21: mod_base = OTHER; note = 2'-O-methylguanosine-3'- phosphorothioate
  modified_base 22: mod_base = OTHER; note = 2'-O-methyluridine-3'-phosphorothioate
  source 1..23: mol_type = other RNA
ataaaaatggaatactcttggtt

SEQ ID NO: 43 - RNA, 21 nt, synthetic construct
  misc_feature 1..21: note = Synthetic
  modified_base 1: mod_base = OTHER; note = 2'-O-methylcytidine-3'- phosphorothioate
  modified_base 2: mod_base = OTHER; note = 2'-O-methyladenosine-3'- phosphorothioate
  modified_base 7: mod_base = OTHER; note = 2'-fluoroguanosine-3'-phosphate
  modified_base 9: mod_base = OTHER; note = 2'-fluoroadenosine-3'-phosphate
  modified_base 10..11: mod_base = OTHER; note = 2'-fluorouridine-3'-phosphate
  source 1..21: mol_type = other RNA
ccaagagtattccatttttat

SEQ ID NO: 44 - RNA, 23 nt, synthetic construct
  misc_feature 1..23: note = Synthetic
  modified_base 1: mod_base = OTHER; note = 2'-O-methyladenosine-3'- phosphorothioate
  modified_base 2: mod_base = OTHER; note = 2'-fluorouridine-3'-phosphate
  modified_base 6: mod_base = OTHER; note = 2'-fluoroadenosine-3'-phosphate
  modified_base 14: mod_base = OTHER; note = 2'-fluoroadenosine-3'-phosphate
  modified_base 16: mod_base = OTHER; note = 2'-fluorouridine-3'-phosphate
  modified_base 21: mod_base = OTHER; note = 2'-O-methylguanosine-3'- phosphorothioate
  modified_base 22: mod_base = OTHER; note = 2'-O-methyluridine-3'-phosphorothioate
  source 1..23: mol_type = other RNA
ataaaaatggaatactcttggtt

SEQ ID NO: 45 - RNA, 21 nt, synthetic construct
  misc_feature 1..21: note = Synthetic
  modified_base 1: mod_base = OTHER; note = 2'-O-methylcytidine-3'- phosphorothioate
  modified_base 2: mod_base = OTHER; note = 2'-O-methyladenosine-3'- phosphorothioate
  modified_base 7: mod_base = OTHER; note = 2'-fluoroguanosine-3'-phosphate
  modified_base 9: mod_base = OTHER; note = 2'-fluoroadenosine-3'-phosphate
  modified_base 10..11: mod_base = OTHER; note = 2'-fluorouridine-3'-phosphate
  source 1..21: mol_type = other RNA
ccaagagtattccatttttat

SEQ ID NO: 46 - RNA, 23 nt, synthetic construct
  misc_feature 1..23: note = Synthetic
  modified_base 1: mod_base = OTHER; note = 2'-O-methyladenosine-3'- phosphorothioate
  modified_base 2: mod_base = OTHER; note = 2'-fluorouridine-3'-phosphate
  modified_base 6: mod_base = OTHER; note = 2'-fluoroadenosine-3'-phosphate
  modified_base 14: mod_base = OTHER; note = 2'-fluoroadenosine-3'-phosphate
  modified_base 16: mod_base = OTHER; note = 2'-fluorouridine-3'-phosphate
  modified_base 21: mod_base = OTHER; note = 2'-O-methylguanosine-3'- phosphorothioate
  modified_base 22: mod_base = OTHER; note = 2'-O-methyluridine-3'-phosphorothioate
  source 1..23: mol_type = other RNA
ataaaaatggaatactcttggtt

SEQ ID NO: 47 - RNA, 21 nt, synthetic construct
  misc_feature 1..21: note = Synthetic
  modified_base 1: mod_base = OTHER; note = 2'-O-methylcytidine-3'- phosphorothioate
  modified_base 2: mod_base = OTHER; note = 2'-O-methyladenosine-3'- phosphorothioate
  modified_base 7: mod_base = OTHER; note = 2'-fluoroguanosine-3'-phosphate
  modified_base 9: mod_base = OTHER; note = 2'-fluoroadenosine-3'-phosphate
  modified_base 10..11: mod_base = OTHER; note = 2'-fluorouridine-3'-phosphate
  source 1..21: mol_type = other RNA
ccaagagtattccatttttat

SEQ ID NO: 48 - RNA, 23 nt, synthetic construct
  misc_feature 1..23: note = Synthetic
  modified_base 1: mod_base = OTHER; note = 2'-O-methyladenosine-3'- phosphorothioate
  modified_base 2: mod_base = OTHER; note = 2'-fluorouridine-3'-phosphate
  modified_base 6: mod_base = OTHER; note = 2'-fluoroadenosine-3'-phosphate
  modified_base 14: mod_base = OTHER; note = 2'-fluoroadenosine-3'-phosphate
  modified_base 16: mod_base = OTHER; note = 2'-fluorouridine-3'-phosphate
  modified_base 21: mod_base = OTHER; note = 2'-O-methylguanosine-3'- phosphorothioate
  modified_base 22: mod_base = OTHER; note = 2'-O-methyluridine-3'-phosphorothioate
  source 1..23: mol_type = other RNA
ataaaaatggaatactcttggtt

SEQ ID NO: 49 - RNA, 18 nt, synthetic construct
  misc_feature 1..18: note = Synthetic
  modified_base 1: mod_base = OTHER; note = 2'-O-methyladenosine-3'- phosphorothioate
  modified_base 2: mod_base = OTHER; note = 2'-O-methylguanosine-3'- phosphorothioate
  modified_base 5: mod_base = OTHER; note = 2'-deoxythimidine -3'-phosphate
  modified_base 7..8: mod_base = OTHER; note = 2'-fluorouridine-3'-phosphate
  modified_base 9: mod_base = OTHER; note = 2'-fluorocytidine-3'-phosphate
  source 1..18: mol_type = other RNA
agagattccatttttact

SEQ ID NO: 50 - RNA, 21 nt, synthetic construct
  misc_feature 1..21: note = Synthetic
  modified_base 1: mod_base = OTHER; note = 2'-O-methyladenosine-3'- phosphorothioate
  modified_base 2: mod_base = OTHER; note = 2'-deoxyguanosine-3'-phosphorothioate
  modified_base 5: mod_base = OTHER; note = 2'-deoxyadenosine-3'-phosphate
  modified_base 7: mod_base = OTHER; note = 2'-deoxyadenosine-3'-phosphate
  modified_base 14: mod_base = OTHER; note = 2'-fluorouridine-3'-phosphate
  modified_base 16: mod_base = OTHER; note = 2'-fluorocytidine-3'-phosphate
  modified_base 19..20: mod_base = OTHER; note = 2'-O-methyluridine-3'-phosphorothioate
  source 1..21: mol_type = other RNA
agtaaaaatggaatactcttg

SEQ ID NO: 51 - RNA, 18 nt, synthetic construct
  misc_feature 1..18: note = Synthetic
  modified_base 1: mod_base = OTHER; note = 2'-O-methyladenosine-3'- phosphorothioate
  modified_base 2: mod_base = OTHER; note = 2'-O-methylguanosine-3'- phosphorothioate
  modified_base 5: mod_base = OTHER; note = 2'-deoxythimidine -3'-phosphate
  modified_base 7..8: mod_base = OTHER; note = 2'-fluorouridine-3'-phosphate
  modified_base 9: mod_base = OTHER; note = 2'-fluorocytidine-3'-phosphate
  source 1..18: mol_type = other RNA
agagattccatttttact

SEQ ID NO: 52 - RNA, 21 nt, synthetic construct
  misc_feature 1..21: note = Synthetic
  modified_base 1: mod_base = OTHER; note = 2'-O-methyladenosine-3'- phosphorothioate
  modified_base 2: mod_base = OTHER; note = 2'-deoxyguanosine-3'-phosphorothioate
  modified_base 5: mod_base = OTHER; note = 2'-deoxyadenosine-3'-phosphate
  modified_base 7: mod_base = OTHER; note = 2'-deoxyadenosine-3'-phosphate
  modified_base 14: mod_base = OTHER; note = 2'-fluorouridine-3'-phosphate
  modified_base 16: mod_base = OTHER; note = 2'-fluorocytidine-3'-phosphate
  modified_base 19..20: mod_base = OTHER; note = 2'-O-methyluridine-3'-phosphorothioate
  source 1..21: mol_type = other RNA
agtaaaaatggaatactcttg

SEQ ID NO: 53 - RNA, 18 nt, synthetic construct
  misc_feature 1..18: note = Synthetic
  modified_base 1: mod_base = OTHER; note = 2'-O-methyladenosine-3'- phosphorothioate
  modified_base 2: mod_base = OTHER; note = 2'-O-methylguanosine-3'- phosphorothioate
  modified_base 5: mod_base = OTHER; note = 2'-deoxythimidine -3'-phosphate
  modified_base 7..8: mod_base = OTHER; note = 2'-fluorouridine-3'-phosphate
  modified_base 9: mod_base = OTHER; note = 2'-fluorocytidine-3'-phosphate
  source 1..18: mol_type = other RNA
agagattccatttttact

SEQ ID NO: 54 - RNA, 21 nt, synthetic construct
  misc_feature 1..21: note = Synthetic
  modified_base 1: mod_base = OTHER; note = 2'-O-methyladenosine-3'- phosphorothioate
  modified_base 2: mod_base = OTHER; note = 2'-deoxyguanosine-3'-phosphorothioate
  modified_base 5: mod_base = OTHER; note = 2'-deoxyadenosine-3'-phosphate
  modified_base 7: mod_base = OTHER; note = 2'-deoxyadenosine-3'-phosphate
  modified_base 14: mod_base = OTHER; note = 2'-fluorouridine-3'-phosphate
  modified_base 16: mod_base = OTHER; note = 2'-fluorocytidine-3'-phosphate
  modified_base 19..20: mod_base = OTHER; note = 2'-O-methyluridine-3'-phosphorothioate
  source 1..21: mol_type = other RNA
agtaaaaatggaatactcttg

SEQ ID NO: 55 - RNA, 18 nt, synthetic construct
  misc_feature 1..18: note = Synthetic
  modified_base 1: mod_base = OTHER; note = 2'-O-methyladenosine-3'- phosphorothioate
  modified_base 2: mod_base = OTHER; note = 2'-O-methylguanosine-3'- phosphorothioate
  modified_base 5: mod_base = OTHER; note = 2'-deoxythimidine -3'-phosphate
  modified_base 7..8: mod_base = OTHER; note = 2'-fluorouridine-3'-phosphate
  modified_base 9: mod_base = OTHER; note = 2'-fluorocytidine-3'-phosphate
  source 1..18: mol_type = other RNA
agagattccatttttact

SEQ ID NO: 56 - RNA, 21 nt, synthetic construct
  misc_feature 1..21: note = Synthetic
  modified_base 1: mod_base = OTHER; note = 2'-O-methyladenosine-3'- phosphorothioate
  modified_base 2: mod_base = OTHER; note = 2'-deoxyguanosine-3'-phosphorothioate
  modified_base 5: mod_base = OTHER; note = 2'-deoxyadenosine-3'-phosphate
  modified_base 7: mod_base = OTHER; note = 2'-deoxyadenosine-3'-phosphate
  modified_base 14: mod_base = OTHER; note = 2'-fluorouridine-3'-phosphate
  modified_base 16: mod_base = OTHER; note = 2'-fluorocytidine-3'-phosphate
  modified_base 19..20: mod_base = OTHER; note = 2'-O-methyluridine-3'-phosphorothioate
  source 1..21: mol_type = other RNA
agtaaaaatggaatactcttg

SEQ ID NO: 57 - RNA, 18 nt, synthetic construct
  misc_feature 1..18: note = Synthetic
  modified_base 1: mod_base = OTHER; note = 2'-O-methyladenosine-3'- phosphorothioate
  modified_base 2: mod_base = OTHER; note = 2'-O-methylguanosine-3'- phosphorothioate
  modified_base 5: mod_base = OTHER; note = 2'-deoxythimidine -3'-phosphate
  modified_base 7..8: mod_base = OTHER; note = 2'-fluorouridine-3'-phosphate
  modified_base 9: mod_base = OTHER; note = 2'-fluorocytidine-3'-phosphate
  source 1..18: mol_type = other RNA
agagattccatttttact

SEQ ID NO: 58 - RNA, 21 nt, synthetic construct
  misc_feature 1..21: note = Synthetic
  modified_base 1: mod_base = OTHER; note = 2'-O-methyladenosine-3'- phosphorothioate
  modified_base 2: mod_base = OTHER; note = 2'-deoxyguanosine-3'-phosphorothioate
  modified_base 5: mod_base = OTHER; note = 2'-deoxyadenosine-3'-phosphate
  modified_base 7: mod_base = OTHER; note = 2'-deoxyadenosine-3'-phosphate
  modified_base 14: mod_base = OTHER; note = 2'-fluorouridine-3'-phosphate
  modified_base 16: mod_base = OTHER; note = 2'-fluorocytidine-3'-phosphate
  modified_base 19..20: mod_base = OTHER; note = 2'-O-methyluridine-3'-phosphorothioate
  source 1..21: mol_type = other RNA
agtaaaaatggaatactcttg

SEQ ID NO: 59 - RNA, 18 nt, synthetic construct
  misc_feature 1..18: note = Synthetic
  modified_base 1: mod_base = OTHER; note = 2'-O-methyladenosine-3'- phosphorothioate
  modified_base 2: mod_base = OTHER; note = 2'-O-methylguanosine-3'- phosphorothioate
  modified_base 5: mod_base = OTHER; note = 2'-deoxythimidine -3'-phosphate
  modified_base 7..8: mod_base = OTHER; note = 2'-fluorouridine-3'-phosphate
  modified_base 9: mod_base = OTHER; note = 2'-fluorocytidine-3'-phosphate
  source 1..18: mol_type = other RNA
agagattccatttttact

SEQ ID NO: 60 - RNA, 21 nt, synthetic construct
  misc_feature 1..21: note = Synthetic
  modified_base 1: mod_base = OTHER; note = 2'-O-methyladenosine-3'- phosphorothioate
  modified_base 2: mod_base = OTHER; note = 2'-deoxyguanosine-3'-phosphorothioate
  modified_base 5: mod_base = OTHER; note = 2'-deoxyadenosine-3'-phosphate
  modified_base 7: mod_base = OTHER; note = 2'-deoxyadenosine-3'-phosphate
  modified_base 14: mod_base = OTHER; note = 2'-fluorouridine-3'-phosphate
  modified_base 16: mod_base = OTHER; note = 2'-fluorocytidine-3'-phosphate
  modified_base 19..20: mod_base = OTHER; note = 2'-O-methyluridine-3'-phosphorothioate
  source 1..21: mol_type = other RNA
agtaaaaatggaatactcttg

SEQ ID NO: 61 - RNA, 18 nt, synthetic construct
  misc_feature 1..18: note = Synthetic
  modified_base 1: mod_base = OTHER; note = 2'-O-methyladenosine-3'- phosphorothioate
  modified_base 2: mod_base = OTHER; note = 2'-O-methylguanosine-3'- phosphorothioate
  modified_base 5: mod_base = OTHER; note = 2'-deoxythimidine -3'-phosphate
  modified_base 7..8: mod_base = OTHER; note = 2'-fluorouridine-3'-phosphate
  modified_base 9: mod_base = OTHER; note = 2'-fluorocytidine-3'-phosphate
  source 1..18: mol_type = other RNA
agagattccatttttact

SEQ ID NO: 62 - RNA, 21 nt, synthetic construct
  misc_feature 1..21: note = Synthetic
  modified_base 1: mod_base = OTHER; note = 2'-O-methyladenosine-3'- phosphorothioate
  modified_base 2: mod_base = OTHER; note = 2'-deoxyguanosine-3'-phosphorothioate
  modified_base 5: mod_base = OTHER; note = 2'-deoxyadenosine-3'-phosphate
  modified_base 7: mod_base = OTHER; note = 2'-deoxyadenosine-3'-phosphate
  modified_base 14: mod_base = OTHER; note = 2'-fluorouridine-3'-phosphate
  modified_base 16: mod_base = OTHER; note = 2'-fluorocytidine-3'-phosphate
  modified_base 19..20: mod_base = OTHER; note = 2'-O-methyluridine-3'-phosphorothioate
  source 1..21: mol_type = other RNA
agtaaaaatggaatactcttg

SEQ ID NO: 63 - RNA, 21 nt, synthetic construct
  misc_feature 1..21: note = Synthetic
  source 1..21: mol_type = other RNA
ctgaaggacgagggatgggat

SEQ ID NO: 64 - RNA, 23 nt, synthetic construct
  misc_feature 1..23: note = Synthetic
  source 1..23: mol_type = other RNA
atcccatccctcgtccttcaggt

SEQ ID NO: 65 - RNA, 21 nt, synthetic construct
  misc_feature 1..21: note = Synthetic
  source 1..21: mol_type = other RNA
tgaaggacgagggatgggatt

SEQ ID NO: 66 - RNA, 23 nt, synthetic construct
  misc_feature 1..23: note = Synthetic
  source 1..23: mol_type = other RNA
aatcccatccctcgtccttcagg

SEQ ID NO: 67 - RNA, 21 nt, synthetic construct
  misc_feature 1..21: note = Synthetic
  source 1..21: mol_type = other RNA
gaaggacgagggatgggattt

SEQ ID NO: 68 - RNA, 23 nt, synthetic construct
  misc_feature 1..23: note = Synthetic
  source 1..23: mol_type = other RNA
aaatcccatccctcgtccttcag

SEQ ID NO: 69 - RNA, 21 nt, synthetic construct
  misc_feature 1..21: note = Synthetic
  source 1..21: mol_type = other RNA
aaggacgagggatgggatttt

SEQ ID NO: 70 - RNA, 23 nt, synthetic construct
  misc_feature 1..23: note = Synthetic
  source 1..23: mol_type = other RNA
aaaatcccatccctcgtccttca

SEQ ID NO: 71 - RNA, 21 nt, synthetic construct
  misc_feature 1..21: note = Synthetic
  source 1..21: mol_type = other RNA
aggacgagggatgggatttca

SEQ ID NO: 72 - RNA, 23 nt, synthetic construct
  misc_feature 1..23: note = Synthetic
  source 1..23: mol_type = other RNA
tgaaatcccatccctcgtccttc

SEQ ID NO: 73 - RNA, 21 nt, synthetic construct
  misc_feature 1..21: note = Synthetic
  source 1..21: mol_type = other RNA
ggacgagggatgggatttcat

SEQ ID NO: 74 - RNA, 23 nt, synthetic construct
  misc_feature 1..23: note = Synthetic
  source 1..23: mol_type = other RNA
atgaaatcccatccctcgtcctt

SEQ ID NO: 75 - RNA, 21 nt, synthetic construct
  misc_feature 1..21: note = Synthetic
  source 1..21: mol_type = other RNA
gacgagggatgggatttcatt

SEQ ID NO: 76 - RNA, 23 nt, synthetic construct
  misc_feature 1..23: note = Synthetic
  source 1..23: mol_type = other RNA
aatgaaatcccatccctcgtcct

SEQ ID NO: 77 - RNA, 21 nt, synthetic construct
  misc_feature 1..21: note = Synthetic
  source 1..21: mol_type = other RNA
acgagggatgggatttcatgt

SEQ ID NO: 78 - RNA, 23 nt, synthetic construct
  misc_feature 1..23: note = Synthetic
  source 1..23: mol_type = other RNA
acatgaaatcccatccctcgtcc

SEQ ID NO: 79 - RNA, 21 nt, synthetic construct
  misc_feature 1..21: note = Synthetic
  source 1..21: mol_type = other RNA
cgagggatgggatttcatgta

SEQ ID NO: 80 - RNA, 23 nt, synthetic construct
  misc_feature 1..23: note = Synthetic
  source 1..23: mol_type = other RNA
tacatgaaatcccatccctcgtc

SEQ ID NO: 81 - RNA, 21 nt, synthetic construct
  misc_feature 1..21: note = Synthetic
  source 1..21: mol_type = other RNA
gagggatgggatttcatgtaa

SEQ ID NO: 82 - RNA, 23 nt, synthetic construct
  misc_feature 1..23: note = Synthetic
  source 1..23: mol_type = other RNA
ttacatgaaatcccatccctcgt

SEQ ID NO: 83 - RNA, 21 nt, synthetic construct
  misc_feature 1..21: note = Synthetic
  source 1..21: mol_type = other RNA
agggatgggatttcatgtaat

SEQ ID NO: 84 - RNA, 23 nt, synthetic construct
  misc_feature 1..23: note = Synthetic
  source 1..23: mol_type = other RNA
attacatgaaatcccatccctcg

SEQ ID NO: 85 - RNA, 21 nt, synthetic construct
  misc_feature 1..21: note = Synthetic
  source 1..21: mol_type = other RNA
gggatgggatttcatgtaact

SEQ ID NO: 86 - RNA, 23 nt, synthetic construct
  misc_feature 1..23: note = Synthetic
  source 1..23: mol_type = other RNA
agttacatgaaatcccatccctc

SEQ ID NO: 87 - RNA, 21 nt, synthetic construct
  misc_feature 1..21: note = Synthetic
  source 1..21: mol_type = other RNA
ggatgggatttcatgtaacca

SEQ ID NO: 88 - RNA, 23 nt, synthetic construct
  misc_feature 1..23: note = Synthetic
  source 1..23: mol_type = other RNA
tggttacatgaaatcccatccct

SEQ ID NO: 89 - RNA, 21 nt, synthetic construct
  misc_feature 1..21: note = Synthetic
  source 1..21: mol_type = other RNA
gatgggatttcatgtaaccaa

SEQ ID NO: 90 - RNA, 23 nt, synthetic construct
  misc_feature 1..23: note = Synthetic
  source 1..23: mol_type = other RNA
ttggttacatgaaatcccatccc

SEQ ID NO: 91 - RNA, 21 nt, synthetic construct
  misc_feature 1..21: note = Synthetic
  source 1..21: mol_type = other RNA
atgggatttcatgtaaccaat

SEQ ID NO: 92 - RNA, 23 nt, synthetic construct
  misc_feature 1..23: note = Synthetic
  source 1..23: mol_type = other RNA
attggttacatgaaatcccatcc

SEQ ID NO: 93 - RNA, 21 nt, synthetic construct
  misc_feature 1..21: note = Synthetic
  source 1..21: mol_type = other RNA
gggatttcatgtaaccaagat

SEQ ID NO: 94 - RNA, 23 nt, synthetic construct
  misc_feature 1..23: note = Synthetic
  source 1..23: mol_type = other RNA
atcttggttacatgaaatcccat

SEQ ID NO: 95 - RNA, 21 nt, synthetic construct
  misc_feature 1..21: note = Synthetic
  source 1..21: mol_type = other RNA
ggatttcatgtaaccaagagt

SEQ ID NO: 96 - RNA, 23 nt, synthetic construct
  misc_feature 1..23: note = Synthetic
  source 1..23: mol_type = other RNA
actcttggttacatgaaatccca

SEQ ID NO: 97 - RNA, 21 nt, synthetic construct
  misc_feature 1..21: note = Synthetic
  source 1..21: mol_type = other RNA
gatttcatgtaaccaagagta

SEQ ID NO: 98 - RNA, 23 nt, synthetic construct
  misc_feature 1..23: note = Synthetic
  source 1..23: mol_type = other RNA
tactcttggttacatgaaatccc

SEQ ID NO: 99 - RNA, 21 nt, synthetic construct
  misc_feature 1..21: note = Synthetic
  source 1..21: mol_type = other RNA
atttcatgtaaccaagagtat

SEQ ID NO: 100 - RNA, 23 nt, synthetic construct
  misc_feature 1..23: note = Synthetic
  source 1..23: mol_type = other RNA
atactcttggttacatgaaatcc

SEQ ID NO: 101 - RNA, 21 nt, synthetic construct
  misc_feature 1..21: note = Synthetic
  source 1..21: mol_type = other RNA
ttcatgtaaccaagagtattt

SEQ ID NO: 102 - RNA, 23 nt, synthetic construct
  misc_feature 1..23: note = Synthetic
  source 1..23: mol_type = other RNA
aaatactcttggttacatgaaat

SEQ ID NO: 103 - RNA, 21 nt, synthetic construct
  misc_feature 1..21: note = Synthetic
  source 1..21: mol_type = other RNA
catgtaaccaagagtattcca

SEQ ID NO: 104 - RNA, 23 nt, synthetic construct
  misc_feature 1..23: note = Synthetic
  source 1..23: mol_type = other RNA
tggaatactcttggttacatgaa

SEQ ID NO: 105 - RNA, 21 nt, synthetic construct
  misc_feature 1..21: note = Synthetic
  source 1..21: mol_type = other RNA
atgtaaccaagagtattccat

SEQ ID NO: 106 - RNA, 23 nt, synthetic construct
  misc_feature 1..23: note = Synthetic
  source 1..23: mol_type = other RNA
atggaatactcttggttacatga

SEQ ID NO: 107 - RNA, 21 nt, synthetic construct
  misc_feature 1..21: note = Synthetic
  source 1..21: mol_type = other RNA
gtaaccaagagtattccattt

SEQ ID NO: 108 - RNA, 23 nt, synthetic construct
  misc_feature 1..23: note = Synthetic
  source 1..23: mol_type = other RNA
aaatggaatactcttggttacat

SEQ ID NO: 109 - RNA, 21 nt, synthetic construct
  misc_feature 1..21: note = Synthetic
  source 1..21: mol_type = other RNA
taaccaagagtattccatttt

SEQ ID NO: 110 - RNA, 23 nt, synthetic construct
  misc_feature 1..23: note = Synthetic
  source 1..23: mol_type = other RNA
aaaatggaatactcttggttaca

SEQ ID NO: 111 - RNA, 21 nt, synthetic construct
  misc_feature 1..21: note = Synthetic
  source 1..21: mol_type = other RNA
accaagagtattccattttta

SEQ ID NO: 112 - RNA, 23 nt, synthetic construct
  misc_feature 1..23: note = Synthetic
  source 1..23: mol_type = other RNA
taaaaatggaatactcttggtta

SEQ ID NO: 113 - RNA, 21 nt, synthetic construct
  misc_feature 1..21: note = Synthetic
  source 1..21: mol_type = other RNA
ccaagagtattccatttttat

SEQ ID NO: 114 - RNA, 23 nt, synthetic construct
  misc_feature 1..23: note = Synthetic
  source 1..23: mol_type = other RNA
ataaaaatggaatactcttggtt

SEQ ID NO: 115 - RNA, 21 nt, synthetic construct
  misc_feature 1..21: note = Synthetic
  source 1..21: mol_type = other RNA
caagagtattccatttttact

SEQ ID NO: 116 - RNA, 23 nt, synthetic construct
  misc_feature 1..23: note = Synthetic
  source 1..23: mol_type = other RNA
agtaaaaatggaatactcttggt

SEQ ID NO: 117 - RNA, 21 nt, synthetic construct
  misc_feature 1..21: note = Synthetic
  source 1..21: mol_type = other RNA
aagagtattccatttttacta

SEQ ID NO: 118 - RNA, 23 nt, synthetic construct
  misc_feature 1..23: note = Synthetic
  source 1..23: mol_type = other RNA
tagtaaaaatggaatactcttgg

SEQ ID NO: 119 - RNA, 21 nt, synthetic construct
  misc_feature 1..21: note = Synthetic
  source 1..21: mol_type = other RNA
agagtattccatttttactaa

SEQ ID NO: 120 - RNA, 23 nt, synthetic construct
  misc_feature 1..23: note = Synthetic
  source 1..23: mol_type = other RNA
ttagtaaaaatggaatactcttg

SEQ ID NO: 121 - RNA, 21 nt, synthetic construct
  misc_feature 1..21: note = Synthetic
  source 1..21: mol_type = other RNA
gagtattccatttttactaaa

SEQ ID NO: 122 - RNA, 23 nt, synthetic construct
  misc_feature 1..23: note = Synthetic
  source 1..23: mol_type = other RNA
tttagtaaaaatggaatactctt

SEQ ID NO: 123 - RNA, 21 nt, synthetic construct
  misc_feature 1..21: note = Synthetic
  source 1..21: mol_type = other RNA
agtattccatttttactaaat

SEQ ID NO: 124 - RNA, 23 nt, synthetic construct
  misc_feature 1..23: note = Synthetic
  source 1..23: mol_type = other RNA
atttagtaaaaatggaatactct

SEQ ID NO: 125 - RNA, 21 nt, synthetic construct
  misc_feature 1..21: note = Synthetic
  source 1..21: mol_type = other RNA
gtattccatttttactaaagt

SEQ ID NO: 126 - RNA, 23 nt, synthetic construct
  misc_feature 1..23: note = Synthetic
  source 1..23: mol_type = other RNA
actttagtaaaaatggaatactc

SEQ ID NO: 127 - RNA, 21 nt, synthetic construct
  misc_feature 1..21: note = Synthetic
  source 1..21: mol_type = other RNA
tattccatttttactaaagca

SEQ ID NO: 128 - RNA, 23 nt, synthetic construct
  misc_feature 1..23: note = Synthetic
  source 1..23: mol_type = other RNA
tgctttagtaaaaatggaatact

SEQ ID NO: 129 - RNA, 21 nt, synthetic construct
  misc_feature 1..21: note = Synthetic
  source 1..21: mol_type = other RNA
attccatttttactaaagcat

SEQ ID NO: 130 - RNA, 23 nt, synthetic construct
  misc_feature 1..23: note = Synthetic
  source 1..23: mol_type = other RNA
atgctttagtaaaaatggaatac

SEQ ID NO: 131 - RNA, 21 nt, synthetic construct
  misc_feature 1..21: note = Synthetic
  source 1..21: mol_type = other RNA
ttccatttttactaaagcagt

SEQ ID NO: 132 - RNA, 23 nt, synthetic construct
  misc_feature 1..23: note = Synthetic
  source 1..23: mol_type = other RNA
actgctttagtaaaaatggaata

SEQ ID NO: 133 - RNA, 21 nt, synthetic construct
  misc_feature 1..21: note = Synthetic
  source 1..21: mol_type = other RNA
ccatttttactaaagcagtgt

SEQ ID NO: 134 - RNA, 23 nt, synthetic construct
  misc_feature 1..23: note = Synthetic
  source 1..23: mol_type = other RNA
acactgctttagtaaaaatggaa

SEQ ID NO: 135 - RNA, 21 nt, synthetic construct
  misc_feature 1..21: note = Synthetic
  source 1..21: mol_type = other RNA
catttttactaaagcagtgtt

SEQ ID NO: 136 - RNA, 23 nt, synthetic construct
  misc_feature 1..23: note = Synthetic
  source 1..23: mol_type = other RNA
aacactgctttagtaaaaatgga

SEQ ID NO: 137 - RNA, 21 nt, synthetic construct
  misc_feature 1..21: note = Synthetic
  source 1..21: mol_type = other RNA
atttttactaaagcagtgttt

SEQ ID NO: 138 - RNA, 23 nt, synthetic construct
  misc_feature 1..23: note = Synthetic
  source 1..23: mol_type = other RNA
aaacactgctttagtaaaaatgg

SEQ ID NO: 139 - RNA, 21 nt, synthetic construct
  misc_feature 1..21: note = Synthetic
  source 1..21: mol_type = other RNA
ttttactaaagcagtgttttt

SEQ ID NO: 140 - RNA, 23 nt, synthetic construct
  misc_feature 1..23: note = Synthetic
  source 1..23: mol_type = other RNA
aaaaacactgctttagtaaaaat

SEQ ID NO: 141 - RNA, 21 nt, synthetic construct
  misc_feature 1..21: note = Synthetic
  source 1..21: mol_type = other RNA
tttactaaagcagtgttttca

SEQ ID NO: 142 - RNA, 23 nt, synthetic construct
  misc_feature 1..23: note = Synthetic
  source 1..23: mol_type = other RNA
tgaaaacactgctttagtaaaaa

SEQ ID NO: 143 - RNA, 21 nt, synthetic construct
  misc_feature 1..21: note = Synthetic
  source 1..21: mol_type = other RNA
ttactaaagcagtgttttcat

SEQ ID NO: 144 - RNA, 23 nt, synthetic construct
  misc_feature 1..23: note = Synthetic
  source 1..23: mol_type = other RNA
atgaaaacactgctttagtaaaa

SEQ ID NO: 145 - RNA, 21 nt, synthetic construct
  misc_feature 1..21: note = Synthetic
  source 1..21: mol_type = other RNA
tactaaagcagtgttttcact

SEQ ID NO: 146 - RNA, 23 nt, synthetic construct
  misc_feature 1..23: note = Synthetic
  source 1..23: mol_type = other RNA
agtgaaaacactgctttagtaaa

SEQ ID NO: 147 - RNA, 21 nt, synthetic construct
  misc_feature 1..21: note = Synthetic
  source 1..21: mol_type = other RNA
actaaagcagtgttttcacct

SEQ ID NO: 148 - RNA, 23 nt, synthetic construct
  misc_feature 1..23: note = Synthetic
  source 1..23: mol_type = other RNA
aggtgaaaacactgctttagtaa

SEQ ID NO: 149 - RNA, 21 nt, synthetic construct
  misc_feature 1..21: note = Synthetic
  source 1..21: mol_type = other RNA
ctaaagcagtgttttcacctt

SEQ ID NO: 150 - RNA, 23 nt, synthetic construct
  misc_feature 1..23: note = Synthetic
  source 1..23: mol_type = other RNA
aaggtgaaaacactgctttagta

SEQ ID NO: 151 - RNA, 21 nt, synthetic construct
  misc_feature 1..21: note = Synthetic
  source 1..21: mol_type = other RNA
taaagcagtgttttcacctca

SEQ ID NO: 152 - RNA, 23 nt, synthetic construct
  misc_feature 1..23: note = Synthetic
  source 1..23: mol_type = other RNA
tgaggtgaaaacactgctttagt

SEQ ID NO: 153 - RNA, 21 nt, synthetic construct
  misc_feature 1..21: note = Synthetic
  source 1..21: mol_type = other RNA
aaagcagtgttttcacctcat

SEQ ID NO: 154 - RNA, 23 nt, synthetic construct
  misc_feature 1..23: note = Synthetic
  source 1..23: mol_type = other RNA
atgaggtgaaaacactgctttag

SEQ ID NO: 155 - RNA, 21 nt, synthetic construct
  misc_feature 1..21: note = Synthetic
  source 1..21: mol_type = other RNA
aagcagtgttttcacctcata

SEQ ID NO: 156 - RNA, 23 nt, synthetic construct
  misc_feature 1..23: note = Synthetic
  source 1..23: mol_type = other RNA
tatgaggtgaaaacactgcttta

SEQ ID NO: 157 - RNA, 21 nt, synthetic construct
  misc_feature 1..21: note = Synthetic
  source 1..21: mol_type = other RNA
agcagtgttttcacctcatat

SEQ ID NO: 158 - RNA, 23 nt, synthetic construct
  misc_feature 1..23: note = Synthetic
  source 1..23: mol_type = other RNA
atatgaggtgaaaacactgcttt

SEQ ID NO: 159 - RNA, 21 nt, synthetic construct
  misc_feature 1..21: note = Synthetic
  source 1..21: mol_type = other RNA
agaagtccaggcagagacaat

SEQ ID NO: 160 - RNA, 23 nt, synthetic construct
  misc_feature 1..23: note = Synthetic
  source 1..23: mol_type = other RNA
attgtctctgcctggacttctaa

SEQ ID NO: 161 - RNA, 21 nt, synthetic construct
  misc_feature 1..21: note = Synthetic
  source 1..21: mol_type = other RNA
gaagtccaggcagagacaata

SEQ ID NO: 162 - RNA, 23 nt, synthetic construct
  misc_feature 1..23: note = Synthetic
  source 1..23: mol_type = other RNA
tattgtctctgcctggacttcta

SEQ ID NO: 163 - RNA, 21 nt, synthetic construct
  misc_feature 1..21: note = Synthetic
  source 1..21: mol_type = other RNA
agtccaggcagagacaataaa

SEQ ID NO: 164 - RNA, 23 nt, synthetic construct
  misc_feature 1..23: note = Synthetic
  source 1..23: mol_type = other RNA
tttattgtctctgcctggacttc

SEQ ID NO: 165 - RNA, 21 nt, synthetic construct
  misc_feature 1..21: note = Synthetic
  source 1..21: mol_type = other RNA
gtccaggcagagacaataaaa

SEQ ID NO: 166 - RNA, 23 nt, synthetic construct
  misc_feature 1..23: note = Synthetic
  source 1..23: mol_type = other RNA
ttttattgtctctgcctggactt

SEQ ID NO: 167 - RNA, 21 nt, synthetic construct
  misc_feature 1..21: note = Synthetic
  source 1..21: mol_type = other RNA
tccaggcagagacaataaaat

SEQ ID NO: 168 - RNA, 23 nt, synthetic construct
  misc_feature 1..23: note = Synthetic
  source 1..23: mol_type = other RNA
attttattgtctctgcctggact

SEQ ID NO: 169 - RNA, 21 nt, synthetic construct
  misc_feature 1..21: note = Synthetic
  source 1..21: mol_type = other RNA
ccaggcagagacaataaaaca

SEQ ID NO: 170 - RNA, 23 nt, synthetic construct
  misc_feature 1..23: note = Synthetic
  source 1..23: mol_type = other RNA
tgttttattgtctctgcctggac

SEQ ID NO: 171 - RNA, 21 nt, synthetic construct
  misc_feature 1..21: note = Synthetic
  source 1..21: mol_type = other RNA
caggcagagacaataaaacat

SEQ ID NO: 172 - RNA, 23 nt, synthetic construct
  misc_feature 1..23: note = Synthetic
  source 1..23: mol_type = other RNA
atgttttattgtctctgcctgga

SEQ ID NO: 173 - RNA, 21 nt, synthetic construct
  misc_feature 1..21: note = Synthetic
  source 1..21: mol_type = other RNA
aggcagagacaataaaacatt

SEQ ID NO: 174 - RNA, 23 nt, synthetic construct
  misc_feature 1..23: note = Synthetic
  source 1..23: mol_type = other RNA
aatgttttattgtctctgcctgg

SEQ ID NO: 175 - RNA, 21 nt, synthetic construct
  misc_feature 1..21: note = Synthetic
  source 1..21: mol_type = other RNA
ggcagagacaataaaacattt

SEQ ID NO: 176 - RNA, 23 nt, synthetic construct
  misc_feature 1..23: note = Synthetic
  source 1..23: mol_type = other RNA
aaatgttttattgtctctgcctg

SEQ ID NO: 177 - RNA, 21 nt, synthetic construct
  misc_feature 1..21: note = Synthetic
  source 1..21: mol_type = other RNA
gcagagacaataaaacattct

SEQ ID NO: 178 - RNA, 23 nt, synthetic construct
  misc_feature 1..23: note = Synthetic
  source 1..23: mol_type = other RNA
agaatgttttattgtctctgcct

SEQ ID NO: 179 - RNA, 21 nt, synthetic construct
  misc_feature 1..21: note = Synthetic
  source 1..21: mol_type = other RNA
agagacaataaaacattcctt

SEQ ID NO: 180 - RNA, 23 nt, synthetic construct
  misc_feature 1..23: note = Synthetic
  source 1..23: mol_type = other RNA
aaggaatgttttattgtctctgc

SEQ ID NO: 181 - RNA, 21 nt, synthetic construct
  misc_feature 1..21: note = Synthetic
  source 1..21: mol_type = other RNA
gagacaataaaacattcctgt

SEQ ID NO: 182 - RNA, 23 nt, synthetic construct
  misc_feature 1..23: note = Synthetic
  source 1..23: mol_type = other RNA
acaggaatgttttattgtctctg

SEQ ID NO: 183 - RNA, 21 nt, synthetic construct
  misc_feature 1..21: note = Synthetic
  source 1..21: mol_type = other RNA
agacaataaaacattcctgtt

SEQ ID NO: 184 - RNA, 23 nt, synthetic construct
  misc_feature 1..23: note = Synthetic
  source 1..23: mol_type = other RNA
aacaggaatgttttattgtctct

SEQ ID NO: 185 - RNA, 21 nt, synthetic construct
  misc_feature 1..21: note = Synthetic
  source 1..21: mol_type = other RNA
gacaataaaacattcctgtga

SEQ ID NO: 186 - RNA, 23 nt, synthetic construct
  misc_feature 1..23: note = Synthetic
  source 1..23: mol_type = other RNA
tcacaggaatgttttattgtctc

SEQ ID NO: 187 - RNA, 21 nt, synthetic construct
  misc_feature 1..21: note = Synthetic
  source 1..21: mol_type = other RNA
acaataaaacattcctgtgaa

SEQ ID NO: 188 - RNA, 23 nt, synthetic construct
  misc_feature 1..23: note = Synthetic
  source 1..23: mol_type = other RNA
ttcacaggaatgttttattgtct

SEQ ID NO: 189 - RNA, 21 nt, synthetic construct
  misc_feature 1..21: note = Synthetic
  source 1..21: mol_type = other RNA
aataaaacattcctgtgaaat

SEQ ID NO: 190 - RNA, 23 nt, synthetic construct
  misc_feature 1..23: note = Synthetic
  source 1..23: mol_type = other RNA
atttcacaggaatgttttattgt

SEQ ID NO: 191 - RNA, 21 nt, synthetic construct
  misc_feature 1..21: note = Synthetic
  source 1..21: mol_type = other RNA
ataaaacattcctgtgaaagt

SEQ ID NO: 192 - RNA, 23 nt, synthetic construct
  misc_feature 1..23: note = Synthetic
  source 1..23: mol_type = other RNA
actttcacaggaatgttttattg

SEQ ID NO: 193 - RNA, 21 nt, synthetic construct
  misc_feature 1..21: note = Synthetic
  source 1..21: mol_type = other RNA
taaaacattcctgtgaaaggt

SEQ ID NO: 194 - RNA, 23 nt, synthetic construct
  misc_feature 1..23: note = Synthetic
  source 1..23: mol_type = other RNA
acctttcacaggaatgttttatt

SEQ ID NO: 195 - RNA, 21 nt, synthetic construct
  misc_feature 1..21: note = Synthetic
  source 1..21: mol_type = other RNA
aaaacattcctgtgaaaggca

SEQ ID NO: 196 - RNA, 23 nt, synthetic construct
  misc_feature 1..23: note = Synthetic
  source 1..23: mol_type = other RNA
tgcctttcacaggaatgttttat

SEQ ID NO: 197 - RNA, 21 nt, synthetic construct
  misc_feature 1..21: note = Synthetic
  source 1..21: mol_type = other RNA
aaacattcctgtgaaaggcat

SEQ ID NO: 198 - RNA, 23 nt, synthetic construct
  misc_feature 1..23: note = Synthetic
  source 1..23: mol_type = other RNA
atgcctttcacaggaatgtttta

SEQ ID NO: 199 - RNA, 21 nt, synthetic construct
  misc_feature 1..21: note = Synthetic
  source 1..21: mol_type = other RNA
aacattcctgtgaaaggcact

SEQ ID NO: 200 - RNA, 23 nt, synthetic construct
  misc_feature 1..23: note = Synthetic
  source 1..23: mol_type = other RNA
agtgcctttcacaggaatgtttt

SEQ ID NO: 201 - RNA, 21 nt, synthetic construct
  misc_feature 1..21: note = Synthetic
  source 1..21: mol_type = other RNA
acattcctgtgaaaggcactt

SEQ ID NO: 202 - RNA, 23 nt, synthetic construct
  misc_feature 1..23: note = Synthetic
  source 1..23: mol_type = other RNA
aagtgcctttcacaggaatgttt

SEQ ID NO: 203 - RNA, 21 nt, synthetic construct
  misc_feature 1..21: note = Synthetic
  source 1..21: mol_type = other RNA
cattcctgtgaaaggcacttt

SEQ ID NO: 204 - RNA, 23 nt, synthetic construct
  misc_feature 1..23: note = Synthetic
  source 1..23: mol_type = other RNA
aaagtgcctttcacaggaatgtt

SEQ ID NO: 205 - RNA, 21 nt, synthetic construct
  misc_feature 1..21: note = Synthetic
  source 1..21: mol_type = other RNA
attcctgtgaaaggcactttt

SEQ ID NO: 206 - RNA, 23 nt, synthetic construct
  misc_feature 1..23: note = Synthetic
  source 1..23: mol_type = other RNA
aaaagtgcctttcacaggaatgt

SEQ ID NO: 207 - RNA, 21 nt, synthetic construct
  misc_feature 1..21: note = Synthetic
  source 1..21: mol_type = other RNA
ttcctgtgaaaggcacttttt

SEQ ID NO: 208 - RNA, 23 nt, synthetic construct
  misc_feature 1..23: note = Synthetic
  source 1..23: mol_type = other RNA
aaaaagtgcctttcacaggaatg

SEQ ID NO: 209 - RNA, 21 nt, synthetic construct
  misc_feature 1..21: note = Synthetic
  source 1..21: mol_type = other RNA
tcctgtgaaaggcacttttca

SEQ ID NO: 210 - RNA, 23 nt, synthetic construct
  misc_feature 1..23: note = Synthetic
  source 1..23: mol_type = other RNA
tgaaaagtgcctttcacaggaat

SEQ ID NO: 211 - RNA, 21 nt, synthetic construct
  misc_feature 1..21: note = Synthetic
  source 1..21: mol_type = other RNA
cctgtgaaaggcacttttcat

SEQ ID NO: 212 - RNA, 23 nt, synthetic construct
  misc_feature 1..23: note = Synthetic
  source 1..23: mol_type = other RNA
atgaaaagtgcctttcacaggaa

SEQ ID NO: 213 - RNA, 21 nt, synthetic construct
  misc_feature 1..21: note = Synthetic
  source 1..21: mol_type = other RNA
ctgtgaaaggcacttttcatt

SEQ ID NO: 214 - RNA, 23 nt, synthetic construct
  misc_feature 1..23: note = Synthetic
  source 1..23: mol_type = other RNA
aatgaaaagtgcctttcacagga

SEQ ID NO: 215 - RNA, 21 nt, synthetic construct
  misc_feature 1..21: note = Synthetic
  source 1..21: mol_type = other RNA
tgtgaaaggcacttttcattt

SEQ ID NO: 216 - RNA, 23 nt, synthetic construct
  misc_feature 1..23: note = Synthetic
  source 1..23: mol_type = other RNA
aaatgaaaagtgcctttcacagg

SEQ ID NO: 217 - RNA, 21 nt, synthetic construct
  misc_feature 1..21: note = Synthetic
  source 1..21: mol_type = other RNA
tgaaaggcacttttcattcca

SEQ ID NO: 218 - RNA, 23 nt, synthetic construct
  misc_feature 1..23: note = Synthetic
  source 1..23: mol_type = other RNA
tggaatgaaaagtgcctttcaca

SEQ ID NO: 219 - RNA, 21 nt, synthetic construct
  misc_feature 1..21: note = Synthetic
  source 1..21: mol_type = other RNA
gaaaggcacttttcattccat

SEQ ID NO: 220 - RNA, 23 nt, synthetic construct
  misc_feature 1..23: note = Synthetic
  source 1..23: mol_type = other RNA
atggaatgaaaagtgcctttcac

SEQ ID NO: 221 - RNA, 21 nt, synthetic construct
  misc_feature 1..21: note = Synthetic
  source 1..21: mol_type = other RNA
ctgaaggacgagggatgggat

SEQ ID NO: 222 - RNA, 23 nt, synthetic construct
  modified_base 7: mod_base = OTHER; note = thymine
  misc_feature 1..23: note = Synthetic
  source 1..23: mol_type = other RNA
atcccatccctcgtccttcaggt

SEQ ID NO: 223 - RNA, 21 nt, synthetic construct
  misc_feature 1..21: note = Synthetic
  source 1..21: mol_type = other RNA
tgaaggacgagggatgggatt

SEQ ID NO: 224 - RNA, 23 nt, synthetic construct
  misc_feature 1..23: note = Synthetic
  source 1..23: mol_type = other RNA
aatcccatccctcgtccttcagg

SEQ ID NO: 225 - RNA, 21 nt, synthetic construct
  misc_feature 1..21: note = Synthetic
  source 1..21: mol_type = other RNA
gaaggacgagggatgggattt

SEQ ID NO: 226 - RNA, 23 nt, synthetic construct
  misc_feature 1..23: note = Synthetic
  source 1..23: mol_type = other RNA
aaatcccatccctcgtccttcag

SEQ ID NO: 227 - RNA, 21 nt, synthetic construct
  misc_feature 1..21: note = Synthetic
  source 1..21: mol_type = other RNA
aaggacgagggatgggatttt

SEQ ID NO: 228 - RNA, 23 nt, synthetic construct
  misc_feature 1..23: note = Synthetic
  source 1..23: mol_type = other RNA
aaaatcccatccctcgtccttca

SEQ ID NO: 229 - RNA, 21 nt, synthetic construct
  misc_feature 1..21: note = Synthetic
  source 1..21: mol_type = other RNA
aggacgagggatgggatttca

SEQ ID NO: 230 - RNA, 23 nt, synthetic construct
  misc_feature 1..23: note = Synthetic
  source 1..23: mol_type = other RNA
tgaaatcccatccctcgtccttc

SEQ ID NO: 231 - RNA, 21 nt, synthetic construct
  misc_feature 1..21: note = Synthetic
  source 1..21: mol_type = other RNA
ggacgagggatgggatttcat

SEQ ID NO: 232 - RNA, 23 nt, synthetic construct
  modified_base 7: mod_base = OTHER; note = thymine
  misc_feature 1..23: note = Synthetic
  source 1..23: mol_type = other RNA
atgaaatcccatccctcgtcctt

SEQ ID NO: 233 - RNA, 21 nt, synthetic construct
  misc_feature 1..21: note = Synthetic
  source 1..21: mol_type = other RNA
gacgagggatgggatttcatt

SEQ ID NO: 234 - RNA, 23 nt, synthetic construct
  misc_feature 1..23: note = Synthetic
  source 1..23: mol_type = other RNA
aatgaaatcccatccctcgtcct

SEQ ID NO: 235 - RNA, 21 nt, synthetic construct
  misc_feature 1..21: note = Synthetic
  source 1..21: mol_type = other RNA
acgagggatgggatttcatgt

SEQ ID NO: 236 - RNA, 23 nt, synthetic construct
  misc_feature 1..23: note = Synthetic
  source 1..23: mol_type = other RNA
acatgaaatcccatccctcgtcc

SEQ ID NO: 237 - RNA, 21 nt, synthetic construct
  misc_feature 1..21: note = Synthetic
  source 1..21: mol_type = other RNA
cgagggatgggatttcatgta

SEQ ID NO: 238 - RNA, 23 nt, synthetic construct
  misc_feature 1..23: note = Synthetic
  source 1..23: mol_type = other RNA
tacatgaaatcccatccctcgtc

SEQ ID NO: 239 - RNA, 21 nt, synthetic construct
  misc_feature 1..21: note = Synthetic
  source 1..21: mol_type = other RNA
gagggatgggatttcatgtaa

SEQ ID NO: 240 - RNA, 23 nt, synthetic construct
  modified_base 6: mod_base = OTHER; note = thymine
  misc_feature 1..23: note = Synthetic
  source 1..23: mol_type = other RNA
ttacatgaaatcccatccctcgt

SEQ ID NO: 241 - RNA, 21 nt, synthetic construct
  misc_feature 1..21: note = Synthetic
  source 1..21: mol_type = other RNA
agggatgggatttcatgtaat

SEQ ID NO: 242 - RNA, 23 nt, synthetic construct
  modified_base 7: mod_base = OTHER; note = thymine
  misc_feature 1..23: note = Synthetic
  source 1..23: mol_type = other RNA
attacatgaaatcccatccctcg

SEQ ID NO: 243 - RNA, 21 nt, synthetic construct
  misc_feature 1..21: note = Synthetic
  source 1..21: mol_type = other RNA
gggatgggatttcatgtaact

SEQ ID NO: 244 - RNA, 23 nt, synthetic construct
  misc_feature 1..23: note = Synthetic
  source 1..23: mol_type = other RNA
agttacatgaaatcccatccctc

SEQ ID NO: 245 - RNA, 21 nt, synthetic construct
  misc_feature 1..21: note = Synthetic
  source 1..21: mol_type = other RNA
ggatgggatttcatgtaacca

SEQ ID NO: 246 - RNA, 23 nt, synthetic construct
  misc_feature 1..23: note = Synthetic
  source 1..23: mol_type = other RNA
tggttacatgaaatcccatccct

SEQ ID NO: 247 - RNA, 21 nt, synthetic construct
  misc_feature 1..21: note = Synthetic
  source 1..21: mol_type = other RNA
gatgggatttcatgtaaccaa

SEQ ID NO: 248 - RNA, 23 nt, synthetic construct
  misc_feature 1..23: note = Synthetic
  source 1..23: mol_type = other RNA
ttggttacatgaaatcccatccc

SEQ ID NO: 249 - RNA, 21 nt, synthetic construct
  misc_feature 1..21: note = Synthetic
  source 1..21: mol_type = other RNA
atgggatttcatgtaaccaat

SEQ ID NO: 250 - RNA, 23 nt, synthetic construct
  modified_base 7: mod_base = OTHER; note = thymine
  misc_feature 1..23: note = Synthetic
  source 1..23: mol_type = other RNA
attggttacatgaaatcccatcc

SEQ ID NO: 251 - RNA, 21 nt, synthetic construct
  misc_feature 1..21: note = Synthetic
  source 1..21: mol_type = other RNA
tgggatttcatgtaaccaaga

SEQ ID NO: 252 - RNA, 23 nt, synthetic construct
  modified_base 7: mod_base = OTHER; note = thymine
  misc_feature 1..23: note = Synthetic
  source 1..23: mol_type = other RNA
tcttggttacatgaaatcccatc

SEQ ID NO: 253 - RNA, 21 nt, synthetic construct
  misc_feature 1..21: note = Synthetic
  source 1..21: mol_type = other RNA
gggatttcatgtaaccaagat

SEQ ID NO: 254 - RNA, 23 nt, synthetic construct
  modified_base 8: mod_base = OTHER; note = thymine
  misc_feature 1..23: note = Synthetic
  source 1..23: mol_type = other RNA
atcttggttacatgaaatcccat

SEQ ID NO: 255 - RNA, 21 nt, synthetic construct
  misc_feature 1..21: note = Synthetic
  source 1..21: mol_type = other RNA
ggatttcatgtaaccaagagt

SEQ ID NO: 256 - RNA, 23 nt, synthetic construct
  modified_base 6: mod_base = OTHER; note = thymine
  misc_feature 1..23: note = Synthetic
  source 1..23: mol_type = other RNA
actcttggttacatgaaatccca

SEQ ID NO: 257 - RNA, 21 nt, synthetic construct
  misc_feature 1..21: note = Synthetic
  source 1..21: mol_type = other RNA
gatttcatgtaaccaagagta

SEQ ID NO: 258 - RNA, 23 nt, synthetic construct
  modified_base 7: mod_base = OTHER; note = thymine
  misc_feature 1..23: note = Synthetic
  source 1..23: mol_type = other RNA
tactcttggttacatgaaatccc

SEQ ID NO: 259 - RNA, 21 nt, synthetic construct
  misc_feature 1..21: note = Synthetic
  source 1..21: mol_type = other RNA
atttcatgtaaccaagagtat

SEQ ID NO: 260 - RNA, 23 nt, synthetic construct
  modified_base 7: mod_base = OTHER; note = thymine
  misc_feature 1..23: note = Synthetic
  source 1..23: mol_type = other RNA
atactcttggttacatgaaatcc

SEQ ID NO: 261 - RNA, 21 nt, synthetic construct
  misc_feature 1..21: note = Synthetic
  source 1..21: mol_type = other RNA
tttcatgtaaccaagagtatt

SEQ ID NO: 262 - RNA, 23 nt, synthetic construct
  misc_feature 1..23: note = Synthetic
  source 1..23: mol_type = other RNA
aatactcttggttacatgaaatc

SEQ ID NO: 263 - RNA, 21 nt, synthetic construct
  misc_feature 1..21: note = Synthetic
  source 1..21: mol_type = other RNA
ttcatgtaaccaagagtattt

SEQ ID NO: 264 - RNA, 23 nt, synthetic construct
  modified_base 7: mod_base = OTHER; note = thymine
  misc_feature 1..23: note = Synthetic
  source 1..23: mol_type = other RNA
aaatactcttggttacatgaaat

SEQ ID NO: 265 - RNA, 21 nt, synthetic construct
  misc_feature 1..21: note = Synthetic
  source 1..21: mol_type = other RNA
tcatgtaaccaagagtattct

SEQ ID NO: 266 - RNA, 23 nt, synthetic construct
  misc_feature 1..23: note = Synthetic
  source 1..23: mol_type = other RNA
agaatactcttggttacatgaaa

SEQ ID NO: 267 - RNA, 21 nt, synthetic construct
  misc_feature 1..21: note = Synthetic
  source 1..21: mol_type = other RNA
catgtaaccaagagtattcca

SEQ ID NO: 268 - RNA, 23 nt, synthetic construct
  misc_feature 1..23: note = Synthetic
  source 1..23: mol_type = other RNA
tggaatactcttggttacatgaa

SEQ ID NO: 269 - RNA, 21 nt, synthetic construct
  misc_feature 1..21: note = Synthetic
  source 1..21: mol_type = other RNA
atgtaaccaagagtattccat

SEQ ID NO: 270 - RNA, 23 nt, synthetic construct
  modified_base 7: mod_base = OTHER; note = thymine
  misc_feature 1..23: note = Synthetic
  source 1..23: mol_type = other RNA
atggaatactcttggttacatga

SEQ ID NO: 271 - RNA, 21 nt, synthetic construct
  misc_feature 1..21: note = Synthetic
  source 1..21: mol_type = other RNA
tgtaaccaagagtattccatt

SEQ ID NO: 272 - RNA, 23 nt, synthetic construct
  misc_feature 1..23: note = Synthetic
  source 1..23: mol_type = other RNA
aatggaatactcttggttacatg

SEQ ID NO: 273 - RNA, 21 nt, synthetic construct
  misc_feature 1..21: note = Synthetic
  source 1..21: mol_type = other RNA
gtaaccaagagtattccattt

SEQ ID NO: 274 - RNA, 23 nt, synthetic construct
  misc_feature 1..23: note = Synthetic
  source 1..23: mol_type = other RNA
aaatggaatactcttggttacat

SEQ ID NO: 275 - RNA, 21 nt, synthetic construct
  misc_feature 1..21: note = Synthetic
  source 1..21: mol_type = other RNA
taaccaagagtattccatttt

SEQ ID NO: 276 - RNA, 23 nt, synthetic construct
  misc_feature 1..23: note = Synthetic
  source 1..23: mol_type = other RNA
aaaatggaatactcttggttaca

SEQ ID NO: 277 - RNA, 21 nt, synthetic construct
  misc_feature 1..21: note = Synthetic
  source 1..21: mol_type = other RNA
accaagagtattccattttta

SEQ ID NO: 278 - RNA, 23 nt, synthetic construct
  modified_base 7: mod_base = OTHER; note = thymine
  misc_feature 1..23: note = Synthetic
  source 1..23: mol_type = other RNA
taaaaatggaatactcttggtta

SEQ ID NO: 279 - RNA, 21 nt, synthetic construct
  misc_feature 1..21: note = Synthetic
  source 1..21: mol_type = other RNA
ccaagagtattccatttttat

SEQ ID NO: 280 - RNA, 23 nt, synthetic construct
  misc_feature 1..23: note = Synthetic
  source 1..23: mol_type = other RNA
ataaaaatggaatactcttggtt

SEQ ID NO: 281 - RNA, 21 nt, synthetic construct
  misc_feature 1..21: note = Synthetic
  source 1..21: mol_type = other RNA
caagagtattccatttttact

SEQ ID NO: 282 - RNA, 23 nt, synthetic construct
  misc_feature 1..23: note = Synthetic
  source 1..23: mol_type = other RNA
agtaaaaatggaatactcttggt

SEQ ID NO: 283 - RNA, 21 nt, synthetic construct
  misc_feature 1..21: note = Synthetic
  source 1..21: mol_type = other RNA
aagagtattccatttttacta

SEQ ID NO: 284 - RNA, 23 nt, synthetic construct
  misc_feature 1..23: note = Synthetic
  source 1..23: mol_type = other RNA
tagtaaaaatggaatactcttgg

SEQ ID NO: 285 - RNA, 21 nt, synthetic construct
  misc_feature 1..21: note = Synthetic
  source 1..21: mol_type = other RNA
agagtattccatttttactaa

SEQ ID NO: 286 - RNA, 23 nt, synthetic construct
  misc_feature 1..23: note = Synthetic
  source 1..23: mol_type = other RNA
ttagtaaaaatggaatactcttg

SEQ ID NO: 287 - RNA, 21 nt, synthetic construct
  misc_feature 1..21: note = Synthetic
  source 1..21: mol_type = other RNA
gagtattccatttttactaaa

SEQ ID NO: 288 - RNA, 23 nt, synthetic construct
  misc_feature 1..23: note = Synthetic
  source 1..23: mol_type = other RNA
tttagtaaaaatggaatactctt

SEQ ID NO: 289 - RNA, 21 nt, synthetic construct
  misc_feature 1..21: note = Synthetic
  source 1..21: mol_type = other RNA
agtattccatttttactaaat

SEQ ID NO: 290 - RNA, 23 nt, synthetic construct
  modified_base 7: mod_base = OTHER; note = thymine
  misc_feature 1..23: note = Synthetic
  source 1..23: mol_type = other RNA
atttagtaaaaatggaatactct

SEQ ID NO: 291 - RNA, 21 nt, synthetic construct
  misc_feature 1..21: note = Synthetic
  source 1..21: mol_type = other RNA
gtattccatttttactaaagt

SEQ ID NO: 292 - RNA, 23 nt, synthetic construct
  misc_feature 1..23: note = Synthetic
  source 1..23: mol_type = other RNA
actttagtaaaaatggaatactc

SEQ ID NO: 293 - RNA, 21 nt, synthetic construct
  misc_feature 1..21: note = Synthetic
  source 1..21: mol_type = other RNA
tattccatttttactaaagca

SEQ ID NO: 294 - RNA, 23 nt, synthetic construct
  misc_feature 1..23: note = Synthetic
  source 1..23: mol_type = other RNA
tgctttagtaaaaatggaatact

SEQ ID NO: 295 - RNA, 21 nt, synthetic construct
  misc_feature 1..21: note = Synthetic
  source 1..21: mol_type = other RNA
attccatttttactaaagcat

SEQ ID NO: 296 - RNA, 23 nt, synthetic construct
  modified_base 7: mod_base = OTHER; note = thymine
  misc_feature 1..23: note = Synthetic
  source 1..23: mol_type = other RNA
atgctttagtaaaaatggaatac

SEQ ID NO: 297 - RNA, 21 nt, synthetic construct
  misc_feature 1..21: note = Synthetic
  source 1..21: mol_type = other RNA
ttccatttttactaaagcagt

SEQ ID NO: 298 - RNA, 23 nt, synthetic construct
  modified_base 7: mod_base = OTHER; note = thymine
  misc_feature 1..23: note = Synthetic
  source 1..23: mol_type = other RNA
actgctttagtaaaaatggaata

SEQ ID NO: 299 - RNA, 21 nt, synthetic construct
  misc_feature 1..21: note = Synthetic
  source 1..21: mol_type = other RNA
tccatttttactaaagcagtt

SEQ ID NO: 300 - RNA, 23 nt, synthetic construct
  modified_base 7: mod_base = OTHER; note = thymine
  misc_feature 1..23: note = Synthetic
  source 1..23: mol_type = other RNA
aactgctttagtaaaaatggaat

SEQ ID NO: 301 - RNA, 21 nt, synthetic construct
  misc_feature 1..21: note = Synthetic
  source 1..21: mol_type = other RNA
ccatttttactaaagcagtgt

SEQ ID NO: 302 - RNA, 23 nt, synthetic construct
  misc_feature 1..23: note = Synthetic
  source 1..23: mol_type = other RNA
acactgctttagtaaaaatggaa

SEQ ID NO: 303 - RNA, 21 nt, synthetic construct
  misc_feature 1..21: note = Synthetic
  source 1..21: mol_type = other RNA
catttttactaaagcagtgtt

SEQ ID NO: 304 - RNA, 23 nt, synthetic construct
  modified_base 6: mod_base = OTHER; note = thymine
  misc_feature 1..23: note = Synthetic
  source 1..23: mol_type = other RNA
aacactgctttagtaaaaatgga

SEQ ID NO: 305 - RNA, 21 nt, synthetic construct
  misc_feature 1..21: note = Synthetic
  source 1..21: mol_type = other RNA
atttttactaaagcagtgttt

SEQ ID NO: 306 - RNA, 23 nt, synthetic construct
  modified_base 7: mod_base = OTHER; note = thymine
  misc_feature 1..23: note = Synthetic
  source 1..23: mol_type = other RNA
aaacactgctttagtaaaaatgg

SEQ ID NO: 307 - RNA, 21 nt, synthetic construct
  misc_feature 1..21: note = Synthetic
  source 1..21: mol_type = other RNA
tttttactaaagcagtgtttt

SEQ ID NO: 308 - RNA, 23 nt, synthetic construct
  misc_feature 1..23: note = Synthetic
  source 1..23: mol_type = other RNA
aaaacactgctttagtaaaaatg

SEQ ID NO: 309 - RNA, 21 nt, synthetic construct
  misc_feature 1..21: note = Synthetic
  source 1..21: mol_type = other RNA
ttttactaaagcagtgttttt

SEQ ID NO: 310 - RNA, 23 nt, synthetic construct
  misc_feature 1..23: note = Synthetic
  source 1..23: mol_type = other RNA
aaaaacactgctttagtaaaaat

SEQ ID NO: 311 - RNA, 21 nt, synthetic construct
  misc_feature 1..21: note = Synthetic
  source 1..21: mol_type = other RNA
tttactaaagcagtgttttca

SEQ ID NO: 312 - RNA, 23 nt, synthetic construct
  misc_feature 1..23: note = Synthetic
  source 1..23: mol_type = other RNA
tgaaaacactgctttagtaaaaa

SEQ ID NO: 313 - RNA, 21 nt, synthetic construct
  misc_feature 1..21: note = Synthetic
  source 1..21: mol_type = other RNA
ttactaaagcagtgttttcat

SEQ ID NO: 314 - RNA, 23 nt, synthetic construct
  misc_feature 1..23: note = Synthetic
  source 1..23: mol_type = other RNA
atgaaaacactgctttagtaaaa

SEQ ID NO: 315 - RNA, 21 nt, synthetic construct
  misc_feature 1..21: note = Synthetic
  source 1..21: mol_type = other RNA
tactaaagcagtgttttcact

SEQ ID NO: 316 - RNA, 23 nt, synthetic construct
  misc_feature 1..23: note = Synthetic
  source 1..23: mol_type = other RNA
agtgaaaacactgctttagtaaa

SEQ ID NO: 317 - RNA, 21 nt, synthetic construct
  misc_feature 1..21: note = Synthetic
  source 1..21: mol_type = other RNA
actaaagcagtgttttcacct

SEQ ID NO: 318 - RNA, 23 nt, synthetic construct
  misc_feature 1..23: note = Synthetic
  source 1..23: mol_type = other RNA
aggtgaaaacactgctttagtaa

SEQ ID NO: 319 - RNA, 21 nt, synthetic construct
  misc_feature 1..21: note = Synthetic
  source 1..21: mol_type = other RNA
ctaaagcagtgttttcacctt

SEQ ID NO: 320 - RNA, 23 nt, synthetic construct
  misc_feature 1..23: note = Synthetic
  source 1..23: mol_type = other RNA
aaggtgaaaacactgctttagta

SEQ ID NO: 321 - RNA, 21 nt, synthetic construct
  misc_feature 1..21: note = Synthetic
  source 1..21: mol_type = other RNA
taaagcagtgttttcacctca

SEQ ID NO: 322 - RNA, 23 nt, synthetic construct
  modified_base 6: mod_base = OTHER; note = thymine
  misc_feature 1..23: note = Synthetic
  source 1..23: mol_type = other RNA
tgaggtgaaaacactgctttagt

SEQ ID NO: 323 - RNA, 21 nt, synthetic construct
  misc_feature 1..21: note = Synthetic
  source 1..21: mol_type = other RNA
aaagcagtgttttcacctcat

SEQ ID NO: 324 - RNA, 23 nt, synthetic construct
  modified_base 7: mod_base = OTHER; note = thymine
  misc_feature 1..23: note = Synthetic
  source 1..23: mol_type = other RNA
atgaggtgaaaacactgctttag

SEQ ID NO: 325 - RNA, 21 nt, synthetic construct
  misc_feature 1..21: note = Synthetic
  source 1..21: mol_type = other RNA
aagcagtgttttcacctcata

SEQ ID NO: 326 - RNA, 23 nt, synthetic construct
  modified_base 8: mod_base = OTHER; note = thymine
  misc_feature 1..23: note = Synthetic
  source 1..23: mol_type = other RNA
tatgaggtgaaaacactgcttta

SEQ ID NO: 327 - RNA, 21 nt, synthetic construct
  misc_feature 1..21: note = Synthetic
  source 1..21: mol_type = other RNA
agcagtgttttcacctcatat

SEQ ID NO: 328 - RNA, 23 nt, synthetic construct
  misc_feature 1..23: note = Synthetic
  source 1..23: mol_type = other RNA
atatgaggtgaaaacactgcttt

SEQ ID NO: 329 - RNA, 21 nt, synthetic construct
  misc_feature 1..21: note = Synthetic
  source 1..21: mol_type = other RNA
agaagtccaggcagagacaat

SEQ ID NO: 330 - RNA, 23 nt, synthetic construct
  modified_base 7: mod_base = OTHER; note = thymine
  misc_feature 1..23: note = Synthetic
  source 1..23: mol_type = other RNA
attgtctctgcctggacttctaa

SEQ ID NO: 331 - RNA, 21 nt, synthetic construct
  misc_feature 1..21: note = Synthetic
  source 1..21: mol_type = other RNA
gaagtccaggcagagacaata

SEQ ID NO: 332 - RNA, 23 nt, synthetic construct
  misc_feature 1..23: note = Synthetic
  source 1..23: mol_type = other RNA
tattgtctctgcctggacttcta

SEQ ID NO: 333 - RNA, 21 nt, synthetic construct
  misc_feature 1..21: note = Synthetic
  source 1..21: mol_type = other RNA
aagtccaggcagagacaataa

SEQ ID NO: 334 - RNA, 23 nt, synthetic construct
  modified_base 7: mod_base = OTHER; note = thymine
  misc_feature 1..23: note = Synthetic
  source 1..23: mol_type = other RNA
ttattgtctctgcctggacttct

SEQ ID NO: 335 - RNA, 21 nt, synthetic construct
  misc_feature 1..21: note = Synthetic
  source 1..21: mol_type = other RNA
agtccaggcagagacaataaa

SEQ ID NO: 336 - RNA, 23 nt, synthetic construct
  modified_base 6: mod_base = OTHER; note = thymine
  misc_feature 1..23: note = Synthetic
  source 1..23: mol_type = other RNA
tttattgtctctgcctggacttc

SEQ ID NO: 337 - RNA, 21 nt, synthetic construct
  misc_feature 1..21: note = Synthetic
  source 1..21: mol_type = other RNA
gtccaggcagagacaataaaa

SEQ ID NO: 338 - RNA, 23 nt, synthetic construct
  modified_base 7: mod_base = OTHER; note = thymine
  misc_feature 1..23: note = Synthetic
  source 1..23: mol_type = other RNA
ttttattgtctctgcctggactt

SEQ ID NO: 339 - RNA, 21 nt, synthetic construct
  misc_feature 1..21: note = Synthetic
  source 1..21: mol_type = other RNA
tccaggcagagacaataaaat

SEQ ID NO: 340 - RNA, 23 nt, synthetic construct
  modified_base 7: mod_base = OTHER; note = thymine
  misc_feature 1..23: note = Synthetic
  source 1..23: mol_type = other RNA
attttattgtctctgcctggact

SEQ ID NO: 341 - RNA, 21 nt, synthetic construct
  misc_feature 1..21: note = Synthetic
  source 1..21: mol_type = other RNA
ccaggcagagacaataaaaca

SEQ ID NO: 342 - RNA, 23 nt, synthetic construct
  misc_feature 1..23: note = Synthetic
  source 1..23: mol_type = other RNA
tgttttattgtctctgcctggac

SEQ ID NO: 343 - RNA, 21 nt, synthetic construct
  misc_feature 1..21: note = Synthetic
  source 1..21: mol_type = other RNA
caggcagagacaataaaacat

SEQ ID NO: 344 - RNA, 23 nt, synthetic construct
  modified_base 7: mod_base = OTHER; note = thymine
  misc_feature 1..23: note = Synthetic
  source 1..23: mol_type = other RNA
atgttttattgtctctgcctgga

SEQ ID NO: 345 - RNA, 21 nt, synthetic construct
  misc_feature 1..21: note = Synthetic
  source 1..21: mol_type = other RNA
aggcagagacaataaaacatt

SEQ ID NO: 346 - RNA, 23 nt, synthetic construct
  modified_base 7: mod_base = OTHER; note = thymine
  misc_feature 1..23: note = Synthetic
  source 1..23: mol_type = other RNA
aatgttttattgtctctgcctgg

SEQ ID NO: 347 - RNA, 21 nt, synthetic construct
  misc_feature 1..21: note = Synthetic
  source 1..21: mol_type = other RNA
ggcagagacaataaaacattt

SEQ ID NO: 348 - RNA, 23 nt, synthetic construct
  modified_base 7: mod_base = OTHER; note = thymine
  misc_feature 1..23: note = Synthetic
  source 1..23: mol_type = other RNA
aaatgttttattgtctctgcctg

SEQ ID NO: 349 - RNA, 21 nt, synthetic construct
  misc_feature 1..21: note = Synthetic
  source 1..21: mol_type = other RNA
gcagagacaataaaacattct

SEQ ID NO: 350 - RNA, 23 nt, synthetic construct
  modified_base 7: mod_base = OTHER; note = thymine
  misc_feature 1..23: note = Synthetic
  source 1..23: mol_type = other RNA
agaatgttttattgtctctgcct

SEQ ID NO: 351 - RNA, 21 nt, synthetic construct
  misc_feature 1..21: note = Synthetic
  source 1..21: mol_type = other RNA
agagacaataaaacattcctt

SEQ ID NO: 352 - RNA, 23 nt, synthetic construct
  modified_base 7: mod_base = OTHER; note = thymine
  misc_feature 1..23: note = Synthetic
  source 1..23: mol_type = other RNA
aaggaatgttttattgtctctgc

SEQ ID NO: 353 - RNA, 21 nt, synthetic construct
  misc_feature 1..21: note = Synthetic
  source 1..21: mol_type = other RNA
gagacaataaaacattcctgt

SEQ ID NO: 354 - RNA, 23 nt, synthetic construct
  misc_feature 1..23: note = Synthetic
  source 1..23: mol_type = other RNA
acaggaatgttttattgtctctg

SEQ ID NO: 355 - RNA, 21 nt, synthetic construct
  misc_feature 1..21: note = Synthetic
  source 1..21: mol_type = other RNA
gacaataaaacattcctgtga

SEQ ID NO: 356 - RNA, 23 nt, synthetic construct
  misc_feature 1..23: note = Synthetic
  source 1..23: mol_type = other RNA
tcacaggaatgttttattgtctc

SEQ ID NO: 357 - RNA, 21 nt, synthetic construct
  misc_feature 1..21: note = Synthetic
  source 1..21: mol_type = other RNA
acaataaaacattcctgtgaa

SEQ ID NO: 358 - RNA, 23 nt, synthetic construct
  misc_feature 1..23: note = Synthetic
  source 1..23: mol_type = other RNA
ttcacaggaatgttttattgtct

SEQ ID NO: 359 - RNA, 21 nt, synthetic construct
  misc_feature 1..21: note = Synthetic
  source 1..21: mol_type = other RNA
caataaaacattcctgtgaaa

SEQ ID NO: 360 - RNA, 23 nt, synthetic construct
  misc_feature 1..23: note = Synthetic
  source 1..23: mol_type = other RNA
tttcacaggaatgttttattgtc

SEQ ID NO: 361 - RNA, 21 nt, synthetic construct
  misc_feature 1..21: note = Synthetic
  source 1..21: mol_type = other RNA
aataaaacattcctgtgaaat

SEQ ID NO: 362 - RNA, 23 nt, synthetic construct
  misc_feature 1..23: note = Synthetic
  source 1..23: mol_type = other RNA
atttcacaggaatgttttattgt

SEQ ID NO: 363 - RNA, 21 nt, synthetic construct
  misc_feature 1..21: note = Synthetic
  source 1..21: mol_type = other RNA
ataaaacattcctgtgaaagt

SEQ ID NO: 364 - RNA, 23 nt, synthetic construct
  misc_feature 1..23: note = Synthetic
  source 1..23: mol_type = other RNA
actttcacaggaatgttttattg

SEQ ID NO: 365 - RNA, 21 nt, synthetic construct
  misc_feature 1..21: note = Synthetic
  source 1..21: mol_type = other RNA
aaaacattcctgtgaaaggca

SEQ ID NO: 366 - RNA, 23 nt, synthetic construct
  modified_base 7: mod_base = OTHER; note = thymine
  misc_feature 1..23: note = Synthetic
  source 1..23: mol_type = other RNA
tgcctttcacaggaatgttttat

SEQ ID NO: 367 - RNA, 21 nt, synthetic construct
  misc_feature 1..21: note = Synthetic
  source 1..21: mol_type = other RNA
aaacattcctgtgaaaggcat

SEQ ID NO: 368 - RNA, 23 nt, synthetic construct
  modified_base 7: mod_base = OTHER; note = thymine
  misc_feature 1..23: note = Synthetic
  source 1..23: mol_type = other RNA
atgcctttcacaggaatgtttta

SEQ ID NO: 369 - RNA, 21 nt, synthetic construct
  misc_feature 1..21: note = Synthetic
  source 1..21: mol_type = other RNA
aacattcctgtgaaaggcact

SEQ ID NO: 370 - RNA, 23 nt, synthetic construct
  modified_base 7: mod_base = OTHER; note = thymine
  misc_feature 1..23: note = Synthetic
  source 1..23: mol_type = other RNA
agtgcctttcacaggaatgtttt

SEQ ID NO: 371 - RNA, 21 nt, synthetic construct
  misc_feature 1..21: note = Synthetic
  source 1..21: mol_type = other RNA
acattcctgtgaaaggcactt

SEQ ID NO: 372 - RNA, 23 nt, synthetic construct
  misc_feature 1..23: note = Synthetic
  source 1..23: mol_type = other RNA
aagtgcctttcacaggaatgttt

SEQ ID NO: 373 - RNA, 21 nt, synthetic construct
  misc_feature 1..21: note = Synthetic
  source 1..21: mol_type = other RNA
cattcctgtgaaaggcacttt

SEQ ID NO: 374 - RNA, 23 nt, synthetic construct
  misc_feature 1..23: note = Synthetic
  source 1..23: mol_type = other RNA
aaagtgcctttcacaggaatgtt

SEQ ID NO: 375 - RNA, 21 nt, synthetic construct
  misc_feature 1..21: note = Synthetic
  source 1..21: mol_type = other RNA
attcctgtgaaaggcactttt

SEQ ID NO: 376 - RNA, 23 nt, synthetic construct
  modified_base 6: mod_base = OTHER; note = thymine
  misc_feature 1..23: note = Synthetic
  source 1..23: mol_type = other RNA
aaaagtgcctttcacaggaatgt

SEQ ID NO: 377 - RNA, 21 nt, synthetic construct
  misc_feature 1..21: note = Synthetic
  source 1..21: mol_type = other RNA
ttcctgtgaaaggcacttttt

SEQ ID NO: 378 - RNA, 23 nt, synthetic construct
  modified_base 7: mod_base = OTHER; note = thymine
  misc_feature 1..23: note = Synthetic
  source 1..23: mol_type = other RNA
aaaaagtgcctttcacaggaatg

SEQ ID NO: 379 - RNA, 21 nt, synthetic construct
  misc_feature 1..21: note = Synthetic
  source 1..21: mol_type = other RNA
tcctgtgaaaggcacttttca

SEQ ID NO: 380 - RNA, 23 nt, synthetic construct
  misc_feature 1..23: note = Synthetic
  source 1..23: mol_type = other RNA
tgaaaagtgcctttcacaggaat

SEQ ID NO: 381 - RNA, 21 nt, synthetic construct
  misc_feature 1..21: note = Synthetic
  source 1..21: mol_type = other RNA
cctgtgaaaggcacttttcat

SEQ ID NO: 382 - RNA, 23 nt, synthetic construct
  misc_feature 1..23: note = Synthetic
  source 1..23: mol_type = other RNA
atgaaaagtgcctttcacaggaa

SEQ ID NO: 383 - RNA, 21 nt, synthetic construct
  misc_feature 1..21: note = Synthetic
  source 1..21: mol_type = other RNA
ctgtgaaaggcacttttcatt

SEQ ID NO: 384 - RNA, 23 nt, synthetic construct
  misc_feature 1..23: note = Synthetic
  source 1..23: mol_type = other RNA
aatgaaaagtgcctttcacagga

SEQ ID NO: 385 - RNA, 21 nt, synthetic construct
  misc_feature 1..21: note = Synthetic
  source 1..21: mol_type = other RNA
tgtgaaaggcacttttcattt

SEQ ID NO: 386 - RNA, 23 nt, synthetic construct
  misc_feature 1..23: note = Synthetic
  source 1..23: mol_type = other RNA
aaatgaaaagtgcctttcacagg

SEQ ID NO: 387 - RNA, 21 nt, synthetic construct
  misc_feature 1..21: note = Synthetic
  source 1..21: mol_type = other RNA
gtgaaaggcacttttcattct

SEQ ID NO: 388 - RNA, 23 nt, synthetic construct
  misc_feature 1..23: note = Synthetic
  source 1..23: mol_type = other RNA
agaatgaaaagtgcctttcacag

SEQ ID NO: 389 - RNA, 21 nt, synthetic construct
  misc_feature 1..21: note = Synthetic
  source 1..21: mol_type = other RNA
tgaaaggcacttttcattcca

SEQ ID NO: 390 - RNA, 23 nt, synthetic construct
  modified_base 6: mod_base = OTHER; note = thymine
  misc_feature 1..23: note = Synthetic
  source 1..23: mol_type = other RNA
tggaatgaaaagtgcctttcaca

SEQ ID NO: 391 - RNA, 21 nt, synthetic construct
  misc_feature 1..21: note = Synthetic
  source 1..21: mol_type = other RNA
gaaaggcacttttcattccat

SEQ ID NO: 392 - RNA, 23 nt, synthetic construct
  modified_base 7: mod_base = OTHER; note = thymine
  misc_feature 1..23: note = Synthetic
  source 1..23: mol_type = other RNA
atggaatgaaaagtgcctttcac

SEQ ID NO: 393 - RNA, 21 nt, synthetic construct
  misc_feature 1..21: note = Synthetic
  source 1..21: mol_type = other RNA
tgtaaccaagagtattccatt

SEQ ID NO: 394 - RNA, 23 nt, synthetic construct
  misc_feature 1..23: note = Synthetic
  source 1..23: mol_type = other RNA
aatggaatactcttggttacatg

SEQ ID NO: 395 - RNA, 21 nt, synthetic construct
  misc_feature 1..21: note = Synthetic
  source 1..21: mol_type = other RNA
aaccaagagtattccattttt

SEQ ID NO: 396 - RNA, 23 nt, synthetic construct
  misc_feature 1..23: note = Synthetic
  source 1..23: mol_type = other RNA
aaaaatggaatactcttggttac

SEQ ID NO: 397 - RNA, 21 nt, synthetic construct
  misc_feature 1..21: note = Synthetic
  source 1..21: mol_type = other RNA
cagagacaataaaacattcct

SEQ ID NO: 398 - RNA, 23 nt, synthetic construct
  misc_feature 1..23: note = Synthetic
  source 1..23: mol_type = other RNA
aggaatgttttattgtctctgcc

SEQ ID NO: 399 - RNA, 21 nt, synthetic construct
  misc_feature 1..21: note = Synthetic
  source 1..21: mol_type = other RNA
tttttactaaagcagtgtttt

SEQ ID NO: 400 - RNA, 23 nt, synthetic construct
  misc_feature 1..23: note = Synthetic
  source 1..23: mol_type = other RNA
aaaacactgctttagtaaaaatg

SEQ ID NO: 401 - RNA, 21 nt, synthetic construct
  misc_feature 1..21: note = Synthetic
  source 1..21: mol_type = other RNA
tttcatgtaaccaagagtatt

SEQ ID NO: 402 - RNA, 23 nt, synthetic construct
  misc_feature 1..23: note = Synthetic
  source 1..23: mol_type = other RNA
aatactcttggttacatgaaatc

SEQ ID NO: 403 - RNA, 21 nt, synthetic construct
  misc_feature 1..21: note = Synthetic
  source 1..21: mol_type = other RNA
caataaaacattcctgtgaaa

SEQ ID NO: 404 - RNA, 23 nt, synthetic construct
  misc_feature 1..23: note = Synthetic
  source 1..23: mol_type = other RNA
tttcacaggaatgttttattgtc

SEQ ID NO: 405 - RNA, 21 nt, synthetic construct
  misc_feature 1..21: note = Synthetic
  source 1..21: mol_type = other RNA
aaccaagagtattccattttt

SEQ ID NO: 406 - RNA, 23 nt, synthetic construct
  modified_base 6: mod_base = OTHER; note = thymine
  misc_feature 1..23: note = Synthetic
  source 1..23: mol_type = other RNA
aaaaatggaatactcttggttac

SEQ ID NO: 407 - RNA, 21 nt, synthetic construct
  misc_feature 1..21: note = Synthetic
  source 1..21: mol_type = other RNA
cagagacaataaaacattcct

SEQ ID NO: 408 - RNA, 23 nt, synthetic construct
  modified_base 6: mod_base = OTHER; note = thymine
  misc_feature 1..23: note = Synthetic
  source 1..23: mol_type = other RNA
aggaatgttttattgtctctgcc

SEQ ID NO: 409 - RNA, 21 nt, synthetic construct
  misc_feature 1..21: note = Synthetic
  source 1..21: mol_type = other RNA
tgggatttcatgtaaccaaga

SEQ ID NO: 410 - RNA, 23 nt, synthetic construct
  misc_feature 1..23: note = Synthetic
  source 1..23: mol_type = other RNA
tcttggttacatgaaatcccatc

SEQ ID NO: 411 - RNA, 21 nt, synthetic construct
  misc_feature 1..21: note = Synthetic
  modified_base 1: mod_base = OTHER; note = 2'-O-methylcytidine-3'- phosphorothioate
  modified_base 2: mod_base = OTHER; note = 2'-O-methyluridine-3'-phosphorothioate
  modified_base 7: mod_base = OTHER; note = 2'-fluoroguanosine-3'-phosphate
  modified_base 9: mod_base = OTHER; note = 2'-fluorocytidine-3'-phosphate
  modified_base 10: mod_base = OTHER; note = 2'-fluoroguanosine-3'-phosphate
  modified_base 11: mod_base = OTHER; note = 2'-fluoroadenosine-3'-phosphate
  modified_base 21: mod_base = OTHER; note = L96
  source 1..21: mol_type = other RNA
ctgaaggacgagggatgggat

SEQ ID NO: 412 - RNA, 23 nt, synthetic construct
  misc_feature 1..23: note = Synthetic
  modified_base 1: mod_base = OTHER; note = 2'-O-methyladenosine-3'-phosphorothioate
  modified_base 2: mod_base = OTHER; note = 2'-fluorouridine -3'-phosphorothioate
  modified_base 6: mod_base = OTHER; note = 2'-fluoroadenosine-3'-phosphate
  modified_base 14: mod_base = OTHER; note = 2'-fluorouridine-3'-phosphate
  modified_base 16: mod_base = OTHER; note = 2'-fluorocytidine-3'-phosphate
  modified_base 21: mod_base = OTHER; note = 2'-O-methylguanosine-3'- phosphorothioate
  modified_base 22: mod_base = OTHER; note = 2'-O-methylguanosine-3'- phosphorothioate
  source 1..23: mol_type = other RNA
atcccatccctcgtccttcaggt

SEQ ID NO: 413 - RNA, 23 nt, synthetic construct
  misc_feature 1..23: note = Synthetic
  source 1..23: mol_type = other RNA
acctgaaggacgagggatgggat

SEQ ID NO: 414 - RNA, 21 nt, synthetic construct
  misc_feature 1..21: note = Synthetic
  modified_base 1: mod_base = OTHER; note = 2'-O-methyluridine-3'-phosphorothioate
  modified_base 2: mod_base = OTHER; note = 2'-O-methylguanosine-3'-phosphorothioate
  modified_base 7: mod_base = OTHER; note = 2'-fluoroadenosine-3'-phosphate
  modified_base 9: mod_base = OTHER; note = 2'-fluoroguanosine-3'-phosphate
  modified_base 10: mod_base = OTHER; note = 2'-fluoroadenosine-3'-phosphate
  modified_base 11: mod_base = OTHER; note = 2'-fluoroguanosine-3'-phosphate
  modified_base 21: mod_base = OTHER; note = L96
  source 1..21: mol_type = other RNA
tgaaggacgagggatgggatt

SEQ ID NO: 415 - RNA, 23 nt, synthetic construct
  misc_feature 1..23: note = Synthetic
  modified_base 1: mod_base = OTHER; note = 2'-O-methyladenosine-3'- phosphorothioate
  modified_base 2: mod_base = OTHER; note = 2'-fluoroadenosine-3'-phosphorothioate
  modified_base 6: mod_base = OTHER; note = 2'-fluorocytidine-3'-phosphate
  modified_base 14: mod_base = OTHER; note = 2'-fluoroguanosine-3'-phosphate
  modified_base 16: mod_base = OTHER; note = 2'-fluorocytidine-3'-phosphate
  modified_base 21: mod_base = OTHER; note = 2'-O-methyladenosine-3'- phosphorothioate
  modified_base 22: mod_base = OTHER; note = 2'-O-methylguanosine-3'- phosphorothioate
  source 1..23: mol_type = other RNA
aatcccatccctcgtccttcagg

SEQ ID NO: 416 - RNA, 23 nt, synthetic construct
  misc_feature 1..23: note = Synthetic
  source 1..23: mol_type = other RNA
cctgaaggacgagggatgggatt

SEQ ID NO: 417 - RNA, 21 nt, synthetic construct
  misc_feature 1..21: note = Synthetic
  modified_base 1: mod_base = OTHER; note = 2'-O-methylguanosine-3'- phosphorothioate
  modified_base 2: mod_base = OTHER; note = 2'-O-methyladenosine-3'-phosphorothioate
  modified_base 7: mod_base = OTHER; note = 2'-fluorocytidine-3'-phosphate
  modified_base 9: mod_base = OTHER; note = 2'-fluoroadenosine-3'-phosphate
  modified_base 10: mod_base = OTHER; note = 2'-fluoroguanosine-3'-phosphate
  modified_base 11: mod_base = OTHER; note = 2'-fluoroguanosine-3'-phosphate
  modified_base 21: mod_base = OTHER; note = L96
  source 1..21: mol_type = other RNA
gaaggacgagggatgggattt

SEQ ID NO: 418 - RNA, 23 nt, synthetic construct
  misc_feature 1..23: note = Synthetic
  modified_base 1: mod_base = OTHER; note = 2'-O-methyladenosine-3'- phosphorothioate
  modified_base 2: mod_base = OTHER; note = 2'-fluoroadenosine-3'-phosphorothioate
  modified_base 6: mod_base = OTHER; note = 2'-fluorocytidine-3'-phosphate
  modified_base 14: mod_base = OTHER; note = 2'-fluorocytidine-3'-phosphate
  modified_base 16: mod_base = OTHER; note = 2'-fluorouridine-3'-phosphate
  modified_base 21: mod_base = OTHER; note = 2'-O-methylcytidine-3'- phosphorothioate
  modified_base 22: mod_base = OTHER; note = 2'-O-methyladenosine-3'- phosphorothioate
  source 1..23: mol_type = other RNA
aaatcccatccctcgtccttcag

SEQ ID NO: 419 - RNA, 23 nt, synthetic construct
  misc_feature 1..23: note = Synthetic
  source 1..23: mol_type = other RNA
ctgaaggacgagggatgggattt

SEQ ID NO: 420 - RNA, 21 nt, synthetic construct
  misc_feature 1..21: note = Synthetic
  modified_base 1: mod_base = OTHER; note = 2'-O-methyladenosine-3'- phosphorothioate
  modified_base 2: mod_base = OTHER; note = 2'-O-methyladenosine-3'-phosphorothioate
  modified_base 7: mod_base = OTHER; note = 2'-fluoroguanosine-3'-phosphate
  modified_base 9: mod_base = OTHER; note = 2'-fluoroguanosine-3'-phosphate
  modified_base 10: mod_base = OTHER; note = 2'-fluoroguanosine-3'-phosphate
  modified_base 11: mod_base = OTHER; note = 2'-fluoroguanosine-3'-phosphate
  modified_base 21: mod_base = OTHER; note = L96
  source 1..21: mol_type = other RNA
aaggacgagggatgggatttt

SEQ ID NO: 421 - RNA, 23 nt, synthetic construct
  misc_feature 1..23: note = Synthetic
  modified_base 1: mod_base = OTHER; note = 2'-O-methyladenosine-3'- phosphorothioate
  modified_base 2: mod_base = OTHER; note = 2'-fluoroadenosine-3'-phosphorothioate
  modified_base 6: mod_base = OTHER; note = 2'-fluorocytidine-3'-phosphate
  modified_base 14: mod_base = OTHER; note = 2'-fluorouridine-3'-phosphate
  modified_base 16: mod_base = OTHER; note = 2'-fluoroguanosine-3'-phosphate
  modified_base 21: mod_base = OTHER; note = 2'-O-methyluridine-3'- phosphorothioate
  modified_base 22: mod_base = OTHER; note = 2'-O-methylcytidine-3'- phosphorothioate
  source 1..23: mol_type = other RNA
aaaatcccatccctcgtccttca

SEQ ID NO: 422 - RNA, 23 nt, synthetic construct
  misc_feature 1..23: note = Synthetic
  source 1..23: mol_type = other RNA
tgaaggacgagggatgggatttc

SEQ ID NO: 423 - RNA, 21 nt, synthetic construct
  misc_feature 1..21: note = Synthetic
  modified_base 1: mod_base = OTHER; note = 2'-O-methyladenosine-3'- phosphorothioate
  modified_base 2: mod_base = OTHER; note = 2'-O-methylguanosine-3'-phosphorothioate
  modified_base 7: mod_base = OTHER; note = 2'-fluoroadenosine-3'-phosphate
  modified_base 9: mod_base = OTHER; note = 2'-fluoroguanosine-3'-phosphate
  modified_base 10: mod_base = OTHER; note = 2'-fluoroguanosine-3'-phosphate
  modified_base 11: mod_base = OTHER; note = 2'-fluoroadenosine-3'-phosphate
  modified_base 21: mod_base = OTHER; note = L96
  source 1..21: mol_type = other RNA
aggacgagggatgggatttca

SEQ ID NO: 424 - RNA, 23 nt, synthetic construct
  misc_feature 1..23: note = Synthetic
  modified_base 1: mod_base = OTHER; note = 2'-O-methyluridine-3'-phosphorothioate
  modified_base 2: mod_base = OTHER; note = 2'-fluoroguanosine-3'-phosphorothioate
  modified_base 6: mod_base = OTHER; note = 2'-fluorouridine-3'-phosphate
  modified_base 14: mod_base = OTHER; note = 2'-fluorocytidine-3'-phosphate
  modified_base 16: mod_base = OTHER; note = 2'-fluorocytidine-3'-phosphate
  modified_base 21: mod_base = OTHER; note = 2'-O-methyluridine-3'-phosphorothioate
  modified_base 22: mod_base = OTHER; note = 2'-O-methyluridine-3'-phosphorothioate
  source 1..23: mol_type = other RNA
tgaaatcccatccctcgtccttc

SEQ ID NO: 425 - RNA, 23 nt, synthetic construct
  misc_feature 1..23: note = Synthetic
  source 1..23: mol_type = other RNA
gaaggacgagggatgggatttca

SEQ ID NO: 426 - RNA, 21 nt, synthetic construct
  misc_feature 1..21: note = Synthetic
  modified_base 1: mod_base = OTHER; note = 2'-O-methylguanosine-3'- phosphorothioate
  modified_base 2: mod_base = OTHER; note = 2'-O-methylguanosine-3'-phosphorothioate
  modified_base 7: mod_base = OTHER; note = 2'-fluoroguanosine-3'-phosphate
  modified_base 9: mod_base = OTHER; note = 2'-fluoroguanosine-3'-phosphate
  modified_base 10: mod_base = OTHER; note = 2'-fluoroadenosine-3'-phosphate
  modified_base 11: mod_base = OTHER; note = 2'-fluorouridine-3'-phosphate
  modified_base 21: mod_base = OTHER; note = L96
  source 1..21: mol_type = other RNA
ggacgagggatgggatttcat

SEQ ID NO: 427 - RNA, 23 nt, synthetic construct
  misc_feature 1..23: note = Synthetic
  modified_base 1: mod_base = OTHER; note = 2'-O-methyladenosine-3'-phosphorothioate
  modified_base 2: mod_base = OTHER; note = 2'-fluorouridine -3'-phosphorothioate
  modified_base 6: mod_base = OTHER; note = 2'-fluoroadenosine-3'-phosphate
  modified_base 14: mod_base = OTHER; note = 2'-fluorocytidine-3'-phosphate
  modified_base 16: mod_base = OTHER; note = 2'-fluorouridine-3'-phosphate
  modified_base 21: mod_base = OTHER; note = 2'-O-methylcytidine-3'- phosphorothioate
  modified_base 22: mod_base = OTHER; note = 2'-O-methyluridine-3'- phosphorothioate
  source 1..23: mol_type = other RNA
atgaaatcccatccctcgtcctt

SEQ ID NO: 428 - RNA, 23 nt, synthetic construct
  misc_feature 1..23: note = Synthetic
  source 1..23: mol_type = other RNA
aaggacgagggatgggatttcat

SEQ ID NO: 429 - RNA, 21 nt, synthetic construct
  misc_feature 1..21: note = Synthetic
  modified_base 1: mod_base = OTHER; note = 2'-O-methylguanosine-3'- phosphorothioate
  modified_base 2: mod_base = OTHER; note = 2'-O-methyladenosine-3'-phosphorothioate
  modified_base 7: mod_base = OTHER; note = 2'-fluoroguanosine-3'-phosphate
  modified_base 9: mod_base = OTHER; note = 2'-fluoroadenosine-3'-phosphate
  modified_base 10: mod_base = OTHER; note = 2'-fluorouridine-3'-phosphate
  modified_base 11: mod_base = OTHER; note = 2'-fluoroguanosine-3'-phosphate
  modified_base 21: mod_base = OTHER; note = L96
  source 1..21: mol_type = other RNA
gacgagggatgggatttcatt

SEQ ID NO: 430 - RNA, 23 nt, synthetic construct
  misc_feature 1..23: note = Synthetic
  modified_base 1: mod_base = OTHER; note = 2'-O-methyladenosine-3'- phosphorothioate
  modified_base 2: mod_base = OTHER; note = 2'-fluoroadenosine-3'-phosphorothioate
  modified_base 6: mod_base = OTHER; note = 2'-fluoroadenosine-3'-phosphate
  modified_base 14: mod_base = OTHER; note = 2'-fluorocytidine-3'-phosphate
  modified_base 16: mod_base = OTHER; note = 2'-fluorocytidine-3'-phosphate
  modified_base 21: mod_base = OTHER; note = 2'-O-methylcytidine-3'- phosphorothioate
  modified_base 22: mod_base = OTHER; note = 2'-O-methylcytidine-3'- phosphorothioate
  source 1..23: mol_type = other RNA
aatgaaatcccatccctcgtcct

SEQ ID NO: 431 - RNA, 23 nt, synthetic construct
  misc_feature 1..23: note = Synthetic
  source 1..23: mol_type = other RNA
aggacgagggatgggatttcatg

SEQ ID NO: 432 - RNA, 21 nt, synthetic construct
  misc_feature 1..21: note = Synthetic
  modified_base 1: mod_base = OTHER; note = 2'-O-methyladenosine-3'- phosphorothioate
  modified_base 2: mod_base = OTHER; note = 2'-O-methylcytidine-3'-phosphorothioate
  modified_base 7: mod_base = OTHER; note = 2'-fluoroguanosine-3'-phosphate
  modified_base 9: mod_base = OTHER; note = 2'-fluorouridine-3'-phosphate
  modified_base 10: mod_base = OTHER; note = 2'-fluoroguanosine-3'-phosphate
  modified_base 11: mod_base = OTHER; note = 2'-fluoroguanosine-3'-phosphate
  modified_base 21: mod_base = OTHER; note = L96
  source 1..21: mol_type = other RNA
acgagggatgggatttcatgt

SEQ ID NO: 433 - RNA, 23 nt, synthetic construct
  misc_feature 1..23: note = Synthetic
  modified_base 1: mod_base = OTHER; note = 2'-O-methyladenosine-3'- phosphorothioate
  modified_base 2: mod_base = OTHER; note = 2'-fluorocytidine-3'-phosphorothioate
  modified_base 6: mod_base = OTHER; note = 2'-fluoroadenosine-3'-phosphate
  modified_base 14: mod_base = OTHER; note = 2'-fluorouridine-3'-phosphate
  modified_base 16: mod_base = OTHER; note = 2'-fluorocytidine-3'-phosphate
  modified_base 21: mod_base = OTHER; note = 2'-O-methyluridine-3'-phosphorothioate
  modified_base 22: mod_base = OTHER; note = 2'-O-methylcytidine-3'- phosphorothioate
  source 1..23: mol_type = other RNA
acatgaaatcccatccctcgtcc

SEQ ID NO: 434 - RNA, 23 nt, synthetic construct
  misc_feature 1..23: note = Synthetic
  source 1..23: mol_type = other RNA
ggacgagggatgggatttcatgt

SEQ ID NO: 435 - RNA, 21 nt, synthetic construct
  misc_feature 1..21: note = Synthetic
  modified_base 1: mod_base = OTHER; note = 2'-O-methylcytidine-3'- phosphorothioate
  modified_base 2: mod_base = OTHER; note = 2'-O-methylguanosine-3'-phosphorothioate
  modified_base 7: mod_base = OTHER; note = 2'-fluoroadenosine-3'-phosphate
  modified_base 9: mod_base = OTHER; note = 2'-fluoroguanosine-3'-phosphate
  modified_base 10: mod_base = OTHER; note = 2'-fluoroguanosine-3'-phosphate
  modified_base 11: mod_base = OTHER; note = 2'-fluoroguanosine-3'-phosphate
  modified_base 21: mod_base = OTHER; note = L96
  source 1..21: mol_type = other RNA
cgagggatgggatttcatgta

SEQ ID NO: 436 - RNA, 23 nt, synthetic construct
  misc_feature 1..23: note = Synthetic
  modified_base 1: mod_base = OTHER; note = 2'-O-methyluridine-3'- phosphorothioate
  modified_base 2: mod_base = OTHER; note = 2'-fluoroadenosine-3'-phosphorothioate
  modified_base 6: mod_base = OTHER; note = 2'-fluoroguanosine-3'-phosphate
  modified_base 14: mod_base = OTHER; note = 2'-fluoroadenosine-3'-phosphate
  modified_base 16: mod_base = OTHER; note = 2'-fluorocytidine-3'-phosphate
  modified_base 21: mod_base = OTHER; note = 2'-O-methylguanosine-3'-phosphorothioate
  modified_base 22: mod_base = OTHER; note = 2'-O-methyluridine-3'- phosphorothioate
  source 1..23: mol_type = other RNA
tacatgaaatcccatccctcgtc

SEQ ID NO: 437 - RNA, 23 nt, synthetic construct
  misc_feature 1..23: note = Synthetic
  source 1..23: mol_type = other RNA
gacgagggatgggatttcatgta

SEQ ID NO: 438 - RNA, 21 nt, synthetic construct
  misc_feature 1..21: note = Synthetic
  modified_base 1: mod_base = OTHER; note = 2'-O-methylguanosine-3'- phosphorothioate
  modified_base 2: mod_base = OTHER; note = 2'-O-methyladenosine-3'-phosphorothioate
  modified_base 7: mod_base = OTHER; note = 2'-fluorouridine-3'-phosphate
  modified_base 9: mod_base = OTHER; note = 2'-fluoroguanosine-3'-phosphate
  modified_base 10: mod_base = OTHER; note = 2'-fluoroguanosine-3'-phosphate
  modified_base 11: mod_base = OTHER; note = 2'-fluoroadenosine-3'-phosphate
  modified_base 21: mod_base = OTHER; note = L96
  source 1..21: mol_type = other RNA
gagggatgggatttcatgtaa

SEQ ID NO: 439 - RNA, 23 nt, synthetic construct
  misc_feature 1..23: note = Synthetic
  modified_base 1: mod_base = OTHER; note = 2'-O-methyluridine-3'- phosphorothioate
  modified_base 2: mod_base = OTHER; note = 2'-fluorouridine-3'-phosphorothioate
  modified_base 6: mod_base = OTHER; note = 2'-fluorouridine-3'-phosphate
  modified_base 14: mod_base = OTHER; note = 2'-fluorocytidine-3'-phosphate
  modified_base 16: mod_base = OTHER; note = 2'-fluorouridine-3'-phosphate
  modified_base 21: mod_base = OTHER; note = 2'-O-methylcytidine-3'-phosphorothioate
  modified_base 22: mod_base = OTHER; note = 2'-O-methylguanosine-3'- phosphorothioate
  source 1..23: mol_type = other RNA
ttacatgaaatcccatccctcgt

SEQ ID NO: 440 - RNA, 23 nt, synthetic construct
  misc_feature 1..23: note = Synthetic
  source 1..23: mol_type = other RNA
acgagggatgggatttcatgtaa

SEQ ID NO: 441 - RNA, 21 nt, synthetic construct
  misc_feature 1..21: note = Synthetic
  modified_base 1: mod_base = OTHER; note = 2'-O-methyladenosine-3'- phosphorothioate
  modified_base 2: mod_base = OTHER; note = 2'-O-methylguanosine-3'-phosphorothioate
  modified_base 7: mod_base = OTHER; note = 2'-fluoroguanosine-3'-phosphate
  modified_base 9: mod_base = OTHER; note = 2'-fluoroguanosine-3'-phosphate
  modified_base 10: mod_base = OTHER; note = 2'-fluoroadenosine-3'-phosphate
  modified_base 11: mod_base = OTHER; note = 2'-fluorouridine-3'-phosphate
  modified_base 21: mod_base = OTHER; note = L96
  source 1..21: mol_type = other RNA
agggatgggatttcatgtaat

SEQ ID NO: 442 - RNA, 23 nt, synthetic construct
  misc_feature 1..23: note = Synthetic
  modified_base 1: mod_base = OTHER; note = 2'-O-methyladenosine-3'-phosphorothioate
  modified_base 2: mod_base = OTHER; note = 2'-fluorouridine -3'-phosphorothioate
  modified_base 6: mod_base = OTHER; note = 2'-fluoroadenosine-3'-phosphate
  modified_base 14: mod_base = OTHER; note = 2'-fluorocytidine-3'-phosphate
  modified_base 16: mod_base = OTHER; note = 2'-fluoroadenosine-3'-phosphate
  modified_base 21: mod_base = OTHER; note = 2'-O-methyluridine-3'- phosphorothioate
  modified_base 22: mod_base = OTHER; note = 2'-O-methylcytidine-3'- phosphorothioate
  source 1..23: mol_type = other RNA
attacatgaaatcccatccctcg

SEQ ID NO: 443 - RNA, 23 nt, synthetic construct
  misc_feature 1..23: note = Synthetic
  source 1..23: mol_type = other RNA
cgagggatgggatttcatgtaac

SEQ ID NO: 444 - RNA, 21 nt, synthetic construct
  misc_feature 1..21: note = Synthetic
  modified_base 1: mod_base = OTHER; note = 2'-O-methylguanosine-3'- phosphorothioate
  modified_base 2: mod_base = OTHER; note = 2'-O-methylguanosine-3'-phosphorothioate
  modified_base 7: mod_base = OTHER; note = 2'-fluoroguanosine-3'-phosphate
  modified_base 9: mod_base = OTHER; note = 2'-fluoroadenosine-3'-phosphate
  modified_base 10: mod_base = OTHER; note = 2'-fluorouridine-3'-phosphate
  modified_base 11: mod_base = OTHER; note = 2'-fluorouridine-3'-phosphate
  modified_base 21: mod_base = OTHER; note = L96
  source 1..21: mol_type = other RNA
gggatgggatttcatgtaact

SEQ ID NO: 445 - RNA, 23 nt, synthetic construct
  misc_feature 1..23: note = Synthetic
  modified_base 1: mod_base = OTHER; note = 2'-O-methyladenosine-3'- phosphorothioate
  modified_base 2: mod_base = OTHER; note = 2'-fluoroguanosine-3'-phosphorothioate
  modified_base 6: mod_base = OTHER; note = 2'-fluorocytidine-3'-phosphate
  modified_base 14: mod_base = OTHER; note = 2'-fluorocytidine-3'-phosphate
  modified_base 16: mod_base = OTHER; note = 2'-fluorocytidine-3'-phosphate
  modified_base 21: mod_base = OTHER; note = 2'-O-methylcytidine-3'-phosphorothioate
  modified_base 22: mod_base = OTHER; note = 2'-O-methyluridine-3'- phosphorothioate
  source 1..23: mol_type = other RNA
agttacatgaaatcccatccctc

SEQ ID NO: 446 - RNA, 23 nt, synthetic construct
  misc_feature 1..23: note = Synthetic
  source 1..23: mol_type = other RNA
gagggatgggatttcatgtaacc

SEQ ID NO: 447 - RNA, 21 nt, synthetic construct
  misc_feature 1..21: note = Synthetic
  modified_base 1: mod_base = OTHER; note = 2'-O-methylguanosine-3'- phosphorothioate
  modified_base 2: mod_base = OTHER; note = 2'-O-methylguanosine-3'-phosphorothioate
  modified_base 7: mod_base = OTHER; note = 2'-fluoroguanosine-3'-phosphate
  modified_base 9: mod_base = OTHER; note = 2'-fluorouridine-3'-phosphate
  modified_base 10: mod_base = OTHER; note = 2'-fluorouridine-3'-phosphate
  modified_base 11: mod_base = OTHER; note = 2'-fluorouridine-3'-phosphate
  modified_base 21: mod_base = OTHER; note = L96
  source 1..21: mol_type = other RNA
ggatgggatttcatgtaacca

SEQ ID NO: 448 - RNA, 23 nt, synthetic construct
  misc_feature 1..23: note = Synthetic
  modified_base 1: mod_base = OTHER; note = 2'-O-methyluridine-3'-phosphorothioate
  modified_base 2: mod_base = OTHER; note = 2'-fluoroguanosine-3'-phosphorothioate
  modified_base 6: mod_base = OTHER; note = 2'-fluoroadenosine-3'-phosphate
  modified_base 14: mod_base = OTHER; note = 2'-fluorouridine-3'-phosphate
  modified_base 16: mod_base = OTHER; note = 2'-fluorocytidine-3'-phosphate
  modified_base 21: mod_base = OTHER; note = 2'-O-methylcytidine-3'-phosphorothioate
  modified_base 22: mod_base = OTHER; note = 2'-O-methylcytidine-3'-phosphorothioate
  source 1..23: mol_type = other RNA
tggttacatgaaatcccatccct

SEQ ID NO: 449 - RNA, 23 nt, synthetic construct
  misc_feature 1..23: note = Synthetic
  source 1..23: mol_type = other RNA
agggatgggatttcatgtaacca

SEQ ID NO: 450 - RNA, 21 nt, synthetic construct
  misc_feature 1..21: note = Synthetic
  modified_base 1: mod_base = OTHER; note = 2'-O-methylguanosine-3'- phosphorothioate
  modified_base 2: mod_base = OTHER; note = 2'-O-methyladenosine-3'-phosphorothioate
  modified_base 7: mod_base = OTHER; note = 2'-fluoroadenosine-3'-phosphate
  modified_base 9: mod_base = OTHER; note = 2'-fluorouridine-3'-phosphate
  modified_base 10: mod_base = OTHER; note = 2'-fluorouridine-3'-phosphate
  modified_base 11: mod_base = OTHER; note = 2'-fluorocytidine-3'-phosphate
  modified_base 21: mod_base = OTHER; note = L96
  source 1..21: mol_type = other RNA
gatgggatttcatgtaaccaa

SEQ ID NO: 451 - RNA, 23 nt, synthetic construct
  misc_feature 1..23: note = Synthetic
  modified_base 1: mod_base = OTHER; note = 2'-O-methyluridine-3'- phosphorothioate
  modified_base 2: mod_base = OTHER; note = 2'-fluorouridine-3'-phosphorothioate
  modified_base 6: mod_base = OTHER; note = 2'-fluorouridine-3'-phosphate
  modified_base 14: mod_base = OTHER; note = 2'-fluoroadenosine-3'-phosphate
  modified_base 16: mod_base = OTHER; note = 2'-fluorocytidine-3'-phosphate
  modified_base 21: mod_base = OTHER; note = 2'-O-methylcytidine-3'-phosphorothioate
  modified_base 22: mod_base = OTHER; note = 2'-O-methylcytidine-3'- phosphorothioate
  source 1..23: mol_type = other RNA
ttggttacatgaaatcccatccc

SEQ ID NO: 452 - RNA, 23 nt, synthetic construct
  misc_feature 1..23: note = Synthetic
  source 1..23: mol_type = other RNA
gggatgggatttcatgtaaccaa

SEQ ID NO: 453 - RNA, 21 nt, synthetic construct
  misc_feature 1..21: note = Synthetic
  modified_base 1: mod_base = OTHER; note = 2'-O-methyladenosine-3'- phosphorothioate
  modified_base 2: mod_base = OTHER; note = 2'-O-methyluridine-3'-phosphorothioate
  modified_base 7: mod_base = OTHER; note = 2'-fluorouridine-3'-phosphate
  modified_base 9: mod_base = OTHER; note = 2'-fluorouridine-3'-phosphate
  modified_base 10: mod_base = OTHER; note = 2'-fluorocytidine-3'-phosphate
  modified_base 11: mod_base = OTHER; note = 2'-fluoroadenosine-3'-phosphate
  modified_base 21: mod_base = OTHER; note = L96
  source 1..21: mol_type = other RNA
atgggatttcatgtaaccaat

SEQ ID NO: 454 - RNA, 23 nt, synthetic construct
  misc_feature 1..23: note = Synthetic
  modified_base 1: mod_base = OTHER; note = 2'-O-methyladenosine-3'-phosphorothioate
  modified_base 2: mod_base = OTHER; note = 2'-fluorouridine -3'-phosphorothioate
  modified_base 6: mod_base = OTHER; note = 2'-fluorouridine-3'-phosphate
  modified_base 14: mod_base = OTHER; note = 2'-fluoroadenosine-3'-phosphate
  modified_base 16: mod_base = OTHER; note = 2'-fluorouridine-3'-phosphate
  modified_base 21: mod_base = OTHER; note = 2'-O-methyluridine-3'- phosphorothioate
  modified_base 22: mod_base = OTHER; note = 2'-O-methylcytidine-3'- phosphorothioate
  source 1..23: mol_type = other RNA
attggttacatgaaatcccatcc

SEQ ID NO: 455 - RNA, 23 nt, synthetic construct
  misc_feature 1..23: note = Synthetic
  source 1..23: mol_type = other RNA
ggatgggatttcatgtaaccaag

SEQ ID NO: 456 - RNA, 21 nt, synthetic construct
  misc_feature 1..21: note = Synthetic
  modified_base 1: mod_base = OTHER; note = 2'-O-methylguanosine-3'- phosphorothioate
  modified_base 2: mod_base = OTHER; note = 2'-O-methylguanosine-3'-phosphorothioate
  modified_base 7: mod_base = OTHER; note = 2'-fluorouridine-3'-phosphate
  modified_base 9: mod_base = OTHER; note = 2'-fluoroadenosine-3'-phosphate
  modified_base 10: mod_base = OTHER; note = 2'-fluorouridine-3'-phosphate
  modified_base 11: mod_base = OTHER; note = 2'-fluoroguanosine-3'-phosphate
  modified_base 21: mod_base = OTHER; note = L96
  source 1..21: mol_type = other RNA
gggatttcatgtaaccaagat

SEQ ID NO: 457 - RNA, 23 nt, synthetic construct
  misc_feature 1..23: note = Synthetic
  modified_base 1: mod_base = OTHER; note = 2'-O-methyladenosine-3'-phosphorothioate
  modified_base 2: mod_base = OTHER; note = 2'-fluorouridine -3'-phosphorothioate
  modified_base 6: mod_base = OTHER; note = 2'-fluoroguanosine-3'-phosphate
  modified_base 14: mod_base = OTHER; note = 2'-fluoroguanosine-3'-phosphate
  modified_base 16: mod_base = OTHER; note = 2'-fluoroadenosine-3'-phosphate
  modified_base 21: mod_base = OTHER; note = 2'-O-methylcytidine-3'- phosphorothioate
  modified_base 22: mod_base = OTHER; note = 2'-O-methyladenosine-3'- phosphorothioate
  source 1..23: mol_type = other RNA
atcttggttacatgaaatcccat

SEQ ID NO: 458 - RNA, 23 nt, synthetic construct
  misc_feature 1..23: note = Synthetic
  source 1..23: mol_type = other RNA
atgggatttcatgtaaccaagag

SEQ ID NO: 459 - RNA, 21 nt, synthetic construct
  misc_feature 1..21: note = Synthetic
  modified_base 1: mod_base = OTHER; note = 2'-O-methylguanosine-3'- phosphorothioate
  modified_base 2: mod_base = OTHER; note = 2'-O-methylguanosine-3'-phosphorothioate
  modified_base 7: mod_base = OTHER; note = 2'-fluorocytdine-3'-phosphate
  modified_base 9: mod_base = OTHER; note = 2'-fluorouridine-3'-phosphate
  modified_base 10: mod_base = OTHER; note = 2'-fluoroguanosine-3'-phosphate
  modified_base 11: mod_base = OTHER; note = 2'-fluorouridine-3'-phosphate
  modified_base 21: mod_base = OTHER; note = L96
  source 1..21: mol_type = other RNA
ggatttcatgtaaccaagagt

SEQ ID NO: 460 - RNA, 23 nt, synthetic construct
  misc_feature 1..23: note = Synthetic
  modified_base 1: mod_base = OTHER; note = 2'-O-methyladenosine-3'- phosphorothioate
  modified_base 2: mod_base = OTHER; note = 2'-fluorocytidine-3'-phosphorothioate
  modified_base 6: mod_base = OTHER; note = 2'-fluorouridine-3'-phosphate
  modified_base 14: mod_base = OTHER; note = 2'-fluorouridine-3'-phosphate
  modified_base 16: mod_base = OTHER; note = 2'-fluoroadenosine-3'-phosphate
  modified_base 21: mod_base = OTHER; note = 2'-O-methylcytidine-3'-phosphorothioate
  modified_base 22: mod_base = OTHER; note = 2'-O-methylcytidine-3'- phosphorothioate
  source 1..23: mol_type = other RNA
actcttggttacatgaaatccca

SEQ ID NO: 461 - RNA, 23 nt, synthetic construct
  misc_feature 1..23: note = Synthetic
  source 1..23: mol_type = other RNA
tgggatttcatgtaaccaagagt

SEQ ID NO: 462 - RNA, 21 nt, synthetic construct
  misc_feature 1..21: note = Synthetic
  modified_base 1: mod_base = OTHER; note = 2'-O-methylguanosine-3'- phosphorothioate
  modified_base 2: mod_base = OTHER; note = 2'-O-methyladenosine-3'-phosphorothioate
  modified_base 7: mod_base = OTHER; note = 2'-fluoroadenosine-3'-phosphate
  modified_base 9: mod_base = OTHER; note = 2'-fluoroguanosine-3'-phosphate
  modified_base 10: mod_base = OTHER; note = 2'-fluorouridine-3'-phosphate
  modified_base 11: mod_base = OTHER; note = 2'-fluoroadenosine-3'-phosphate
  modified_base 21: mod_base = OTHER; note = L96
  source 1..21: mol_type = other RNA
gatttcatgtaaccaagagta

SEQ ID NO: 463 - RNA, 23 nt, synthetic construct
  misc_feature 1..23: note = Synthetic
  modified_base 1: mod_base = OTHER; note = 2'-O-methyluridine-3'- phosphorothioate
  modified_base 2: mod_base = OTHER; note = 2'-fluoroadenosine-3'-phosphorothioate
  modified_base 6: mod_base = OTHER; note = 2'-fluorouridine-3'-phosphate
  modified_base 14: mod_base = OTHER; note = 2'-fluoroadenosine-3'-phosphate
  modified_base 16: mod_base = OTHER; note = 2'-fluoroguanosine-3'-phosphate
  modified_base 21: mod_base = OTHER; note = 2'-O-methylcytidine-3'-phosphorothioate
  modified_base 22: mod_base = OTHER; note = 2'-O-methylcytidine-3'- phosphorothioate
  source 1..23: mol_type = other RNA
tactcttggttacatgaaatccc

SEQ ID NO: 464 - RNA, 23 nt, synthetic construct
  misc_feature 1..23: note = Synthetic
  source 1..23: mol_type = other RNA
gggatttcatgtaaccaagagta

SEQ ID NO: 465 - RNA, 21 nt, synthetic construct
  misc_feature 1..21: note = Synthetic
  modified_base 1: mod_base = OTHER; note = 2'-O-methyladenosine-3'- phosphorothioate
  modified_base 2: mod_base = OTHER; note = 2'-O-methyluridine-3'-phosphorothioate
  modified_base 7: mod_base = OTHER; note = 2'-fluorouridine-3'-phosphate
  modified_base 9: mod_base = OTHER; note = 2'-fluorouridine-3'-phosphate
  modified_base 10: mod_base = OTHER; note = 2'-fluoroadenosine-3'-phosphate
  modified_base 11: mod_base = OTHER; note = 2'-fluoroadenosine-3'-phosphate
  modified_base 21: mod_base = OTHER; note = L96
  source 1..21: mol_type = other RNA
atttcatgtaaccaagagtat

SEQ ID NO: 466 - RNA, 23 nt, synthetic construct
  misc_feature 1..23: note = Synthetic
  modified_base 1: mod_base = OTHER; note = 2'-O-methyladenosine-3'- phosphorothioate
  modified_base 2: mod_base = OTHER; note = 2'-fluorouridine-3'-phosphorothioate
  modified_base 6: mod_base = OTHER; note = 2'-fluorocytidine-3'-phosphate
  modified_base 14: mod_base = OTHER; note = 2'-fluorocytidine-3'-phosphate
  modified_base 16: mod_base = OTHER; note = 2'-fluorouridine-3'-phosphate
  modified_base 21: mod_base = OTHER; note = 2'-O-methyluridine-3'-phosphorothioate
  modified_base 22: mod_base = OTHER; note = 2'-O-methylcytidine-3'- phosphorothioate
  source 1..23: mol_type = other RNA
atactcttggttacatgaaatcc

SEQ ID NO: 467 - RNA, 23 nt, synthetic construct
  misc_feature 1..23: note = Synthetic
  source 1..23: mol_type = other RNA
ggatttcatgtaaccaagagtat

SEQ ID NO: 468 - RNA, 21 nt, synthetic construct
  misc_feature 1..21: note = Synthetic
  modified_base 1: mod_base = OTHER; note = 2'-O-methyluridine-3'- phosphorothioate
  modified_base 2: mod_base = OTHER; note = 2'-O-methyluridine-3'-phosphorothioate
  modified_base 7: mod_base = OTHER; note = 2'-fluorouridine-3'-phosphate
  modified_base 9: mod_base = OTHER; note = 2'-fluoroadenosine-3'-phosphate
  modified_base 10: mod_base = OTHER; note = 2'-fluorocytidine-3'-phosphate
  modified_base 11: mod_base = OTHER; note = 2'-fluorocytidine-3'-phosphate
  modified_base 21: mod_base = OTHER; note = L96
  source 1..21: mol_type = other RNA
ttcatgtaaccaagagtattt

SEQ ID NO: 469 - RNA, 23 nt, synthetic construct
  misc_feature 1..23: note = Synthetic
  modified_base 1: mod_base = OTHER; note = 2'-O-methyladenosine-3'- phosphorothioate
  modified_base 2: mod_base = OTHER; note = 2'-fluoroadenosine-3'-phosphorothioate
  modified_base 6: mod_base = OTHER; note = 2'-fluorocytidine-3'-phosphate
  modified_base 14: mod_base = OTHER; note = 2'-fluorouridine-3'-phosphate
  modified_base 16: mod_base = OTHER; note = 2'-fluorocytidine-3'-phosphate
  modified_base 21: mod_base = OTHER; note = 2'-O-methyladenosine-3'- phosphorothioate
  modified_base 22: mod_base = OTHER; note = 2'-O-methyladenosine-3'- phosphorothioate
  source 1..23: mol_type = other RNA
aaatactcttggttacatgaaat

SEQ ID NO: 470 - RNA, 23 nt, synthetic construct
  misc_feature 1..23: note = Synthetic
  source 1..23: mol_type = other RNA
atttcatgtaaccaagagtattc

SEQ ID NO: 471 - RNA, 21 nt, synthetic construct
  misc_feature 1..21: note = Synthetic
  modified_base 1: mod_base = OTHER; note = 2'-O-methylcytidine-3'- phosphorothioate
  modified_base 2: mod_base = OTHER; note = 2'-O-methyladenosine-3'-phosphorothioate
  modified_base 7: mod_base = OTHER; note = 2'-fluoroadenosine-3'-phosphate
  modified_base 9: mod_base = OTHER; note = 2'-fluorocytidine-3'-phosphate
  modified_base 10: mod_base = OTHER; note = 2'-fluoroadenosine-3'-phosphate
  modified_base 11: mod_base = OTHER; note = 2'-fluoroadenosine-3'-phosphate
  modified_base 21: mod_base = OTHER; note = L96
  source 1..21: mol_type = other RNA
catgtaaccaagagtattcca

SEQ ID NO: 472 - RNA, 23 nt, synthetic construct
  misc_feature 1..23: note = Synthetic
  modified_base 1: mod_base = OTHER; note = 2'-O-methyluridine-3'-phosphorothioate
  modified_base 2: mod_base = OTHER; note = 2'-fluoroguanosine-3'-phosphorothioate
  modified_base 6: mod_base = OTHER; note = 2'-fluorouridine-3'-phosphate
  modified_base 14: mod_base = OTHER; note = 2'-fluoroguanosine-3'-phosphate
  modified_base 16: mod_base = OTHER; note = 2'-fluorouridine-3'-phosphate
  modified_base 21: mod_base = OTHER; note = 2'-O-methylguanosine-3'-phosphorothioate
  modified_base 22: mod_base = OTHER; note = 2'-O-methyladenosine-3'-phosphorothioate
  source 1..23: mol_type = other RNA
tggaatactcttggttacatgaa

SEQ ID NO: 473 - RNA, 23 nt, synthetic construct
  misc_feature 1..23: note = Synthetic
  source 1..23: mol_type = other RNA
ttcatgtaaccaagagtattcca

SEQ ID NO: 474 - RNA, 21 nt, synthetic construct
  misc_feature 1..21: note = Synthetic
  modified_base 1: mod_base = OTHER; note = 2'-O-methyladenosine-3'- phosphorothioate
  modified_base 2: mod_base = OTHER; note = 2'-O-methyluridine-3'-phosphorothioate
  modified_base 7: mod_base = OTHER; note = 2'-fluorocytidine-3'-phosphate
  modified_base 9: mod_base = OTHER; note = 2'-fluoroadenosine-3'-phosphate
  modified_base 10: mod_base = OTHER; note = 2'-fluoroadenosine-3'-phosphate
  modified_base 11: mod_base = OTHER; note = 2'-fluoroguanosine-3'-phosphate
  modified_base 21: mod_base = OTHER; note = L96
  source 1..21: mol_type = other RNA
atgtaaccaagagtattccat

SEQ ID NO: 475 - RNA, 23 nt, synthetic construct
  misc_feature 1..23: note = Synthetic
  modified_base 1: mod_base = OTHER; note = 2'-O-methyladenosine-3'- phosphorothioate
  modified_base 2: mod_base = OTHER; note = 2'-fluorouridine-3'-phosphorothioate
  modified_base 6: mod_base = OTHER; note = 2'-fluoroadenosine-3'-phosphate
  modified_base 14: mod_base = OTHER; note = 2'-fluoroguanosine-3'-phosphate
  modified_base 16: mod_base = OTHER; note = 2'-fluorouridine-3'-phosphate
  modified_base 21: mod_base = OTHER; note = 2'-O-methyluridine-3'-phosphorothioate
  modified_base 22: mod_base = OTHER; note = 2'-O-methylguanosine-3'- phosphorothioate
  source 1..23: mol_type = other RNA
atggaatactcttggttacatga

SEQ ID NO: 476 - RNA, 23 nt, synthetic construct
  misc_feature 1..23: note = Synthetic
  source 1..23: mol_type = other RNA
tcatgtaaccaagagtattccat

SEQ ID NO: 477 - RNA, 21 nt, synthetic construct
  misc_feature 1..21: note = Synthetic
  modified_base 1: mod_base = OTHER; note = 2'-O-methylguanosine-3'- phosphorothioate
  modified_base 2: mod_base = OTHER; note = 2'-O-methyluridine-3'-phosphorothioate
  modified_base 7: mod_base = OTHER; note = 2'-fluoroadenosine-3'-phosphate
  modified_base 9: mod_base = OTHER; note = 2'-fluoroguanosine-3'-phosphate
  modified_base 10: mod_base = OTHER; note = 2'-fluoroadenosine-3'-phosphate
  modified_base 11: mod_base = OTHER; note = 2'-fluoroguanosine-3'-phosphate
  modified_base 21: mod_base = OTHER; note = L96
  source 1..21: mol_type = other RNA
gtaaccaagagtattccattt

SEQ ID NO: 478 - RNA, 23 nt, synthetic construct
  misc_feature 1..23: note = Synthetic
  modified_base 1: mod_base = OTHER; note = 2'-O-methyladenosine-3'- phosphorothioate
  modified_base 2: mod_base = OTHER; note = 2'-fluoroadenosine-3'-phosphorothioate
  modified_base 6: mod_base = OTHER; note = 2'-fluoroguanosine-3'-phosphate
  modified_base 14: mod_base = OTHER; note = 2'-fluorouridine-3'-phosphate
  modified_base 16: mod_base = OTHER; note = 2'-fluoroguanosine-3'-phosphate
  modified_base 21: mod_base = OTHER; note = 2'-O-methylcytidine-3'- phosphorothioate
  modified_base 22: mod_base = OTHER; note = 2'-O-methyladenosine-3'- phosphorothioate
  source 1..23: mol_type = other RNA
aaatggaatactcttggttacat

SEQ ID NO: 479 - RNA, 23 nt, synthetic construct
  misc_feature 1..23: note = Synthetic
  source 1..23: mol_type = other RNA
atgtaaccaagagtattccattt

SEQ ID NO: 480 - RNA, 21 nt, synthetic construct
  misc_feature 1..21: note = Synthetic
  modified_base 1: mod_base = OTHER; note = 2'-O-methyluridine-3'- phosphorothioate
  modified_base 2: mod_base = OTHER; note = 2'-O-methyladenosine-3'-phosphorothioate
  modified_base 7: mod_base = OTHER; note = 2'-fluoroadenosine-3'-phosphate
  modified_base 9: mod_base = OTHER; note = 2'-fluoroadenosine-3'-phosphate
  modified_base 10: mod_base = OTHER; note = 2'-fluoroguanosine-3'-phosphate
  modified_base 11: mod_base = OTHER; note = 2'-fluorouridine-3'-phosphate
  modified_base 21: mod_base = OTHER; note = L96
  source 1..21: mol_type = other RNA
taaccaagagtattccatttt

SEQ ID NO: 481 - RNA, 23 nt, synthetic construct
  misc_feature 1..23: note = Synthetic
  modified_base 1: mod_base = OTHER; note = 2'-O-methyladenosine-3'- phosphorothioate
  modified_base 2: mod_base = OTHER; note = 2'-fluoroadenosine-3'-phosphorothioate
  modified_base 6: mod_base = OTHER; note = 2'-fluoroguanosine-3'-phosphate
  modified_base 14: mod_base = OTHER; note = 2'-fluorocytidine-3'-phosphate
  modified_base 16: mod_base = OTHER; note = 2'-fluorouridine-3'-phosphate
  modified_base 21: mod_base = OTHER; note = 2'-O-methyladenosine-3'- phosphorothioate
  modified_base 22: mod_base = OTHER; note = 2'-O-methylcytidine-3'- phosphorothioate
  source 1..23: mol_type = other RNA
aaaatggaatactcttggttaca

SEQ ID NO: 482 - RNA, 23 nt, synthetic construct
  misc_feature 1..23: note = Synthetic
  source 1..23: mol_type = other RNA
tgtaaccaagagtattccatttt

SEQ ID NO: 483 - RNA, 21 nt, synthetic construct
  misc_feature 1..21: note = Synthetic
  modified_base 1: mod_base = OTHER; note = 2'-O-methyladenosine-3'- phosphorothioate
  modified_base 2: mod_base = OTHER; note = 2'-O-methylcytidine-3'-phosphorothioate
  modified_base 7: mod_base = OTHER; note = 2'-fluoroadenosine-3'-phosphate
  modified_base 9: mod_base = OTHER; note = 2'-fluorouridine-3'-phosphate
  modified_base 10: mod_base = OTHER; note = 2'-fluoroadenosine-3'-phosphate
  modified_base 11: mod_base = OTHER; note = 2'-fluorouridine-3'-phosphate
  modified_base 21: mod_base = OTHER; note = L96
  source 1..21: mol_type = other RNA
accaagagtattccattttta

SEQ ID NO: 484 - RNA, 23 nt, synthetic construct
  misc_feature 1..23: note = Synthetic
  modified_base 1: mod_base = OTHER; note = 2'-O-methyluridine-3'- phosphorothioate
  modified_base 2: mod_base = OTHER; note = 2'-fluoroadenosine-3'-phosphorothioate
  modified_base 6: mod_base = OTHER; note = 2'-fluoroadenosine-3'-phosphate
  modified_base 14: mod_base = OTHER; note = 2'-fluorocytidine-3'-phosphate
  modified_base 16: mod_base = OTHER; note = 2'-fluorocytidine-3'-phosphate
  modified_base 21: mod_base = OTHER; note = 2'-O-methyluridine-3'-phosphorothioate
  modified_base 22: mod_base = OTHER; note = 2'-O-methyluridine-3'- phosphorothioate
  source 1..23: mol_type = other RNA
taaaaatggaatactcttggtta

SEQ ID NO: 485 - RNA, 23 nt, synthetic construct
  misc_feature 1..23: note = Synthetic
  source 1..23: mol_type = other RNA
taaccaagagtattccattttta

SEQ ID NO: 486 - RNA, 21 nt, synthetic construct
  misc_feature 1..21: note = Synthetic
  modified_base 1: mod_base = OTHER; note = 2'-O-methylcytidine-3'- phosphorothioate
  modified_base 2: mod_base = OTHER; note = 2'-O-methylcytidine-3'-phosphorothioate
  modified_base 7: mod_base = OTHER; note = 2'-fluoroguanosine-3'-phosphate
  modified_base 9: mod_base = OTHER; note = 2'-fluoroadenosine-3'-phosphate
  modified_base 10: mod_base = OTHER; note = 2'-fluorouridine-3'-phosphate
  modified_base 11: mod_base = OTHER; note = 2'-fluorouridine-3'-phosphate
  modified_base 21: mod_base = OTHER; note = L96
  source 1..21: mol_type = other RNA
ccaagagtattccatttttat

SEQ ID NO: 487 - RNA, 23 nt, synthetic construct
  misc_feature 1..23: note = Synthetic
  modified_base 1: mod_base = OTHER; note = 2'-O-methyladenosine-3'- phosphorothioate
  modified_base 2: mod_base = OTHER; note = 2'-fluorouridine-3'-phosphorothioate
  modified_base 6: mod_base = OTHER; note = 2'-fluoroadenosine-3'-phosphate
  modified_base 14: mod_base = OTHER; note = 2'-fluoroadenosine-3'-phosphate
  modified_base 16: mod_base = OTHER; note = 2'-fluorouridine-3'-phosphate
  modified_base 21: mod_base = OTHER; note = 2'-O-methylguanosine-3'-phosphorothioate
  modified_base 22: mod_base = OTHER; note = 2'-O-methyluridine-3'- phosphorothioate
  source 1..23: mol_type = other RNA
ataaaaatggaatactcttggtt

SEQ ID NO: 488 - RNA, 23 nt, synthetic construct
  misc_feature 1..23: note = Synthetic
  source 1..23: mol_type = other RNA
aaccaagagtattccatttttac

SEQ ID NO: 489 - RNA, 21 nt, synthetic construct
  misc_feature 1..21: note = Synthetic
  modified_base 1: mod_base = OTHER; note = 2'-O-methylcytidine-3'- phosphorothioate
  modified_base 2: mod_base = OTHER; note = 2'-O-methyladenosine-3'-phosphorothioate
  modified_base 7: mod_base = OTHER; note = 2'-fluorouridine-3'-phosphate
  modified_base 9: mod_base = OTHER; note = 2'-fluorouridine-3'-phosphate
  modified_base 10: mod_base = OTHER; note = 2'-fluorouridine-3'-phosphate
  modified_base 11: mod_base = OTHER; note = 2'-fluorocytidine-3'-phosphate
  modified_base 21: mod_base = OTHER; note = L96
  source 1..21: mol_type = other RNA
caagagtattccatttttact

SEQ ID NO: 490 - RNA, 23 nt, synthetic construct
  misc_feature 1..23: note = Synthetic
  modified_base 1: mod_base = OTHER; note = 2'-O-methyladenosine-3'- phosphorothioate
  modified_base 2: mod_base = OTHER; note = 2'-fluoroguanosine-3'-phosphorothioate
  modified_base 6: mod_base = OTHER; note = 2'-fluoroadenosine-3'-phosphate
  modified_base 14: mod_base = OTHER; note = 2'-fluorouridine-3'-phosphate
  modified_base 16: mod_base = OTHER; note = 2'-fluorocytidine-3'-phosphate
  modified_base 21: mod_base = OTHER; note = 2'-O-methylguanosine-3'-phosphorothioate
  modified_base 22: mod_base = OTHER; note = 2'-O-methylguanosine-3'- phosphorothioate
  source 1..23: mol_type = other RNA
agtaaaaatggaatactcttggt

SEQ ID NO: 491 - RNA, 23 nt, synthetic construct
  misc_feature 1..23: note = Synthetic
  source 1..23: mol_type = other RNA
accaagagtattccatttttact

SEQ ID NO: 492 - RNA, 21 nt, synthetic construct
  misc_feature 1..21: note = Synthetic
  modified_base 1: mod_base = OTHER; note = 2'-O-methyladenosine-3'- phosphorothioate
  modified_base 2: mod_base = OTHER; note = 2'-O-methyladenosine-3'-phosphorothioate
  modified_base 7: mod_base = OTHER; note = 2'-fluoroadenosine-3'-phosphate
  modified_base 9: mod_base = OTHER; note = 2'-fluorouridine-3'-phosphate
  modified_base 10: mod_base = OTHER; note = 2'-fluorocytidine-3'-phosphate
  modified_base 11: mod_base = OTHER; note = 2'-fluorocytidine-3'-phosphate
  modified_base 21: mod_base = OTHER; note = L96
  source 1..21: mol_type = other RNA
aagagtattccatttttacta

SEQ ID NO: 493 - RNA, 23 nt, synthetic construct
  misc_feature 1..23: note = Synthetic
  modified_base 1: mod_base = OTHER; note = 2'-O-methyluridine-3'- phosphorothioate
  modified_base 2: mod_base = OTHER; note = 2'-fluoroadenosine-3'-phosphorothioate
  modified_base 6: mod_base = OTHER; note = 2'-fluoroadenosine-3'-phosphate
  modified_base 14: mod_base = OTHER; note = 2'-fluoroadenosine-3'-phosphate
  modified_base 16: mod_base = OTHER; note = 2'-fluoroadenosine-3'-phosphate
  modified_base 21: mod_base = OTHER; note = 2'-O-methyluridine-3'-phosphorothioate
  modified_base 22: mod_base = OTHER; note = 2'-O-methylguanosine-3'- phosphorothioate
  source 1..23: mol_type = other RNA
tagtaaaaatggaatactcttgg

SEQ ID NO: 494 - RNA, 23 nt, synthetic construct
  misc_feature 1..23: note = Synthetic
  source 1..23: mol_type = other RNA
ccaagagtattccatttttacta

SEQ ID NO: 495 - RNA, 21 nt, synthetic construct
  misc_feature 1..21: note = Synthetic
  modified_base 1: mod_base = OTHER; note = 2'-O-methyladenosine-3'- phosphorothioate
  modified_base 2: mod_base = OTHER; note = 2'-O-methylguanosine-3'-phosphorothioate
  modified_base 7: mod_base = OTHER; note = 2'-fluorouridine-3'-phosphate
  modified_base 9: mod_base = OTHER; note = 2'-fluorocytidine-3'-phosphate
  modified_base 10: mod_base = OTHER; note = 2'-fluorocytidine-3'-phosphate
  modified_base 11: mod_base = OTHER; note = 2'-fluoroadenosine-3'-phosphate
  modified_base 21: mod_base = OTHER; note = L96
  source 1..21: mol_type = other RNA
agagtattccatttttactaa

SEQ ID NO: 496 - RNA, 23 nt, synthetic construct
  misc_feature 1..23: note = Synthetic
  modified_base 1: mod_base = OTHER; note = 2'-O-methyluridine-3'- phosphorothioate
  modified_base 2: mod_base = OTHER; note = 2'-fluorouridine-3'-phosphorothioate
  modified_base 6: mod_base = OTHER; note = 2'-fluoroadenosine-3'-phosphate
  modified_base 14: mod_base = OTHER; note = 2'-fluoroadenosine-3'-phosphate
  modified_base 16: mod_base = OTHER; note = 2'-fluorouridine-3'-phosphate
  modified_base 21: mod_base = OTHER; note = 2'-O-methyluridine-3'-phosphorothioate
  modified_base 22: mod_base = OTHER; note = 2'-O-methyluridine-3'- phosphorothioate
  source 1..23: mol_type = other RNA
ttagtaaaaatggaatactcttg

SEQ ID NO: 497 - RNA, 23 nt, synthetic construct
  misc_feature 1..23: note = Synthetic
  source 1..23: mol_type = other RNA
caagagtattccatttttactaa

SEQ ID NO: 498 - RNA, 21 nt, synthetic construct
  misc_feature 1..21: note = Synthetic
  modified_base 1: mod_base = OTHER; note = 2'-O-methylguanosine-3'- phosphorothioate
  modified_base 2: mod_base = OTHER; note = 2'-O-methyladenosine-3'-phosphorothioate
  modified_base 7: mod_base = OTHER; note = 2'-fluorouridine-3'-phosphate
  modified_base 9: mod_base = OTHER; note = 2'-fluorocytidine-3'-phosphate
  modified_base 10: mod_base = OTHER; note = 2'-fluoroadenosine-3'-phosphate
  modified_base 11: mod_base = OTHER; note = 2'-fluorouridine-3'-phosphate
  modified_base 21: mod_base = OTHER; note = L96
  source 1..21: mol_type = other RNA
gagtattccatttttactaaa

SEQ ID NO: 499 - RNA, 23 nt, synthetic construct
  misc_feature 1..23: note = Synthetic
  modified_base 1: mod_base = OTHER; note = 2'-O-methyluridine-3'- phosphorothioate
  modified_base 2: mod_base = OTHER; note = 2'-fluorouridine-3'-phosphorothioate
  modified_base 6: mod_base = OTHER; note = 2'-fluorouridine-3'-phosphate
  modified_base 14: mod_base = OTHER; note = 2'-fluoroguanosine-3'-phosphate
  modified_base 16: mod_base = OTHER; note = 2'-fluoroadenosine-3'-phosphate
  modified_base 21: mod_base = OTHER; note = 2'-O-methyluridine-3'-phosphorothioate
  modified_base 22: mod_base = OTHER; note = 2'-O-methyluridine-3'- phosphorothioate
  source 1..23: mol_type = other RNA
tttagtaaaaatggaatactctt

SEQ ID NO: 500 - RNA, 23 nt, synthetic construct
  misc_feature 1..23: note = Synthetic
  source 1..23: mol_type = other RNA
aagagtattccatttttactaaa

SEQ ID NO: 501 - RNA, 21 nt, synthetic construct
  misc_feature 1..21: note = Synthetic
  modified_base 1: mod_base = OTHER; note = 2'-O-methyladenosine-3'- phosphorothioate
  modified_base 2: mod_base = OTHER; note = 2'-O-methylguanosine-3'-phosphorothioate
  modified_base 7: mod_base = OTHER; note = 2'-fluorocytidine-3'-phosphate
  modified_base 9: mod_base = OTHER; note = 2'-fluoroadenosine-3'-phosphate
  modified_base 10: mod_base = OTHER; note = 2'-fluorouridine-3'-phosphate
  modified_base 11: mod_base = OTHER; note = 2'-fluorouridine-3'-phosphate
  modified_base 21: mod_base = OTHER; note = L96
  source 1..21: mol_type = other RNA
agtattccatttttactaaat

SEQ ID NO: 502 - RNA, 23 nt, synthetic construct
  misc_feature 1..23: note = Synthetic
  modified_base 1: mod_base = OTHER; note = 2'-O-methyladenosine-3'- phosphorothioate
  modified_base 2: mod_base = OTHER; note = 2'-fluorouridine-3'-phosphorothioate
  modified_base 6: mod_base = OTHER; note = 2'-fluoroguanosine-3'-phosphate
  modified_base 14: mod_base = OTHER; note = 2'-fluoroguanosine-3'-phosphate
  modified_base 16: mod_base = OTHER; note = 2'-fluoroadenosine-3'-phosphate
  modified_base 21: mod_base = OTHER; note = 2'-O-methyluridine-3'-phosphorothioate
  modified_base 22: mod_base = OTHER; note = 2'-O-methylcytidine-3'- phosphorothioate
  source 1..23: mol_type = other RNA
atttagtaaaaatggaatactct

SEQ ID NO: 503 - RNA, 23 nt, synthetic construct
  misc_feature 1..23: note = Synthetic
  source 1..23: mol_type = other RNA
agagtattccatttttactaaag

SEQ ID NO: 504 - RNA, 21 nt, synthetic construct
  misc_feature 1..21: note = Synthetic
  modified_base 1: mod_base = OTHER; note = 2'-O-methylguanosine-3'- phosphorothioate
  modified_base 2: mod_base = OTHER; note = 2'-O-methyluridine-3'-phosphorothioate
  modified_base 7: mod_base = OTHER; note = 2'-fluorocytidine-3'-phosphate
  modified_base 9: mod_base = OTHER; note = 2'-fluorouridine-3'-phosphate
  modified_base 10: mod_base = OTHER; note = 2'-fluorouridine-3'-phosphate
  modified_base 11: mod_base = OTHER; note = 2'-fluorouridine-3'-phosphate
  modified_base 21: mod_base = OTHER; note = L96
  source 1..21: mol_type = other RNA
gtattccatttttactaaagt

SEQ ID NO: 505 - RNA, 23 nt, synthetic construct
  misc_feature 1..23: note = Synthetic
  modified_base 1: mod_base = OTHER; note = 2'-O-methyladenosine-3'- phosphorothioate
  modified_base 2: mod_base = OTHER; note = 2'-fluorocytidine-3'-phosphorothioate
  modified_base 6: mod_base = OTHER; note = 2'-fluoroadenosine-3'-phosphate
  modified_base 14: mod_base = OTHER; note = 2'-fluorouridine-3'-phosphate
  modified_base 16: mod_base = OTHER; note = 2'-fluoroguanosine-3'-phosphate
  modified_base 21: mod_base = OTHER; note = 2'-O-methylcytidine-3'-phosphorothioate
  modified_base 22: mod_base = OTHER; note = 2'-O-methyluridine-3'- phosphorothioate
  source 1..23: mol_type = other RNA
actttagtaaaaatggaatactc

SEQ ID NO: 506 - RNA, 23 nt, synthetic construct
  misc_feature 1..23: note = Synthetic
  source 1..23: mol_type = other RNA
gagtattccatttttactaaagc

SEQ ID NO: 507 - RNA, 21 nt, synthetic construct
  misc_feature 1..21: note = Synthetic
  modified_base 1: mod_base = OTHER; note = 2'-O-methyluridine-3'- phosphorothioate
  modified_base 2: mod_base = OTHER; note = 2'-O-methyladenosine-3'-phosphorothioate
  modified_base 7: mod_base = OTHER; note = 2'-fluoroadenosine-3'-phosphate
  modified_base 9: mod_base = OTHER; note = 2'-fluorouridine-3'-phosphate
  modified_base 10: mod_base = OTHER; note = 2'-fluorouridine-3'-phosphate
  modified_base 11: mod_base = OTHER; note = 2'-fluorouridine-3'-phosphate
  modified_base 21: mod_base = OTHER; note = L96
  source 1..21: mol_type = other RNA
tattccatttttactaaagca

SEQ ID NO: 508 - RNA, 23 nt, synthetic construct
  misc_feature 1..23: note = Synthetic
  modified_base 1: mod_base = OTHER; note = 2'-O-methyluridine-3'-phosphorothioate
  modified_base 2: mod_base = OTHER; note = 2'-fluoroguanosine-3'-phosphorothioate
  modified_base 6: mod_base = OTHER; note = 2'-fluorouridine-3'-phosphate
  modified_base 14: mod_base = OTHER; note = 2'-fluoroadenosine-3'-phosphate
  modified_base 16: mod_base = OTHER; note = 2'-fluoroguanosine-3'-phosphate
  modified_base 21: mod_base = OTHER; note = 2'-O-methyladenosine-3'-phosphorothioate
  modified_base 22: mod_base = OTHER; note = 2'-O-methylcytidine-3'-phosphorothioate
  source 1..23: mol_type = other RNA
tgctttagtaaaaatggaatact

SEQ ID NO: 509 - RNA, 23 nt, synthetic construct
  misc_feature 1..23: note = Synthetic
  source 1..23: mol_type = other RNA
agtattccatttttactaaagca

SEQ ID NO: 510 - RNA, 21 nt, synthetic construct
  misc_feature 1..21: note = Synthetic
  modified_base 1: mod_base = OTHER; note = 2'-O-methyladenosine-3'- phosphorothioate
  modified_base 2: mod_base = OTHER; note = 2'-O-methyluridine-3'-phosphorothioate
  modified_base 7: mod_base = OTHER; note = 2'-fluorouridine-3'-phosphate
  modified_base 9: mod_base = OTHER; note = 2'-fluorouridine-3'-phosphate
  modified_base 10: mod_base = OTHER; note = 2'-fluorouridine-3'-phosphate
  modified_base 11: mod_base = OTHER; note = 2'-fluorouridine-3'-phosphate
  modified_base 21: mod_base = OTHER; note = L96
  source 1..21: mol_type = other RNA
attccatttttactaaagcat

SEQ ID NO: 511 - RNA, 23 nt, synthetic construct
  misc_feature 1..23: note = Synthetic
  modified_base 1: mod_base = OTHER; note = 2'-O-methyladenosine-3'- phosphorothioate
  modified_base 2: mod_base = OTHER; note = 2'-fluorouridine-3'-phosphorothioate
  modified_base 6: mod_base = OTHER; note = 2'-fluorouridine-3'-phosphate
  modified_base 14: mod_base = OTHER; note = 2'-fluoroadenosine-3'-phosphate
  modified_base 16: mod_base = OTHER; note = 2'-fluorouridine-3'-phosphate
  modified_base 21: mod_base = OTHER; note = 2'-O-methyluridine-3'-phosphorothioate
  modified_base 22: mod_base = OTHER; note = 2'-O-methyladenosine-3'- phosphorothioate
  source 1..23: mol_type = other RNA
atgctttagtaaaaatggaatac

SEQ ID NO: 512 - RNA, 23 nt, synthetic construct
  misc_feature 1..23: note = Synthetic
  source 1..23: mol_type = other RNA
gtattccatttttactaaagcag

SEQ ID NO: 513 - RNA, 21 nt, synthetic construct
  misc_feature 1..21: note = Synthetic
  modified_base 1: mod_base = OTHER; note = 2'-O-methyluridine-3'- phosphorothioate
  modified_base 2: mod_base = OTHER; note = 2'-O-methyluridine-3'-phosphorothioate
  modified_base 7: mod_base = OTHER; note = 2'-fluorouridine-3'-phosphate
  modified_base 9: mod_base = OTHER; note = 2'-fluorouridine-3'-phosphate
  modified_base 10: mod_base = OTHER; note = 2'-fluorouridine-3'-phosphate
  modified_base 11: mod_base = OTHER; note = 2'-fluoroadenosine-3'-phosphate
  modified_base 21: mod_base = OTHER; note = L96
  source 1..21: mol_type = other RNA
ttccatttttactaaagcagt

SEQ ID NO: 514 - RNA, 23 nt, synthetic construct
  misc_feature 1..23: note = Synthetic
  modified_base 1: mod_base = OTHER; note = 2'-O-methyladenosine-3'- phosphorothioate
  modified_base 2: mod_base = OTHER; note = 2'-fluorocytidine-3'-phosphorothioate
  modified_base 6: mod_base = OTHER; note = 2'-fluorouridine-3'-phosphate
  modified_base 14: mod_base = OTHER; note = 2'-fluoroadenosine-3'-phosphate
  modified_base 16: mod_base = OTHER; note = 2'-fluoroadenosine-3'-phosphate
  modified_base 21: mod_base = OTHER; note = 2'-O-methyladenosine-3'-phosphorothioate
  modified_base 22: mod_base = OTHER; note = 2'-O-methyluridine-3'- phosphorothioate
  source 1..23: mol_type = other RNA
actgctttagtaaaaatggaata

SEQ ID NO: 515 - RNA, 23 nt, synthetic construct
  misc_feature 1..23: note = Synthetic
  source 1..23: mol_type = other RNA
tattccatttttactaaagcagt

SEQ ID NO: 516 - RNA, 21 nt, synthetic construct
  misc_feature 1..21: note = Synthetic
  modified_base 1: mod_base = OTHER; note = 2'-O-methylcytidine-3'- phosphorothioate
  modified_base 2: mod_base = OTHER; note = 2'-O-methylcytidine-3'-phosphorothioate
  modified_base 7: mod_base = OTHER; note = 2'-fluorouridine-3'-phosphate
  modified_base 9: mod_base = OTHER; note = 2'-fluoroadenosine-3'-phosphate
  modified_base 10: mod_base = OTHER; note = 2'-fluorocytidine-3'-phosphate
  modified_base 11: mod_base = OTHER; note = 2'-fluorouridine-3'-phosphate
  modified_base 21: mod_base = OTHER; note = L96
  source 1..21: mol_type = other RNA
ccatttttactaaagcagtgt

SEQ ID NO: 517 - RNA, 23 nt, synthetic construct
  misc_feature 1..23: note = Synthetic
  modified_base 1: mod_base = OTHER; note = 2'-O-methyladenosine-3'- phosphorothioate
  modified_base 2: mod_base = OTHER; note = 2'-fluorocytidine-3'-phosphorothioate
  modified_base 6: mod_base = OTHER; note = 2'-fluoroguanosine-3'-phosphate
  modified_base 14: mod_base = OTHER; note = 2'-fluoroadenosine-3'-phosphate
  modified_base 16: mod_base = OTHER; note = 2'-fluoroadenosine-3'-phosphate
  modified_base 21: mod_base = OTHER; note = 2'-O-methylguanosine-3'-phosphorothioate
  modified_base 22: mod_base = OTHER; note = 2'-O-methyladenosine-3'- phosphorothioate
  source 1..23: mol_type = other RNA
acactgctttagtaaaaatggaa

SEQ ID NO: 518 - RNA, 23 nt, synthetic construct
  misc_feature 1..23: note = Synthetic
  source 1..23: mol_type = other RNA
ttccatttttactaaagcagtgt

SEQ ID NO: 519 - RNA, 21 nt, synthetic construct
  misc_feature 1..21: note = Synthetic
  modified_base 1: mod_base = OTHER; note = 2'-O-methylcytidine-3'- phosphorothioate
  modified_base 2: mod_base = OTHER; note = 2'-O-methyladenosine-3'-phosphorothioate
  modified_base 7: mod_base = OTHER; note = 2'-fluorouridine-3'-phosphate
  modified_base 9: mod_base = OTHER; note = 2'-fluorocytidine-3'-phosphate
  modified_base 10: mod_base = OTHER; note = 2'-fluorouridine-3'-phosphate
  modified_base 11: mod_base = OTHER; note = 2'-fluoroadenosine-3'-phosphate
  modified_base 21: mod_base = OTHER; note = L96
  source 1..21: mol_type = other RNA
catttttactaaagcagtgtt

SEQ ID NO: 520 - RNA, 23 nt, synthetic construct
  misc_feature 1..23: note = Synthetic
  modified_base 1: mod_base = OTHER; note = 2'-O-methyladenosine-3'- phosphorothioate
  modified_base 2: mod_base = OTHER; note = 2'-fluoroadenosine-3'-phosphorothioate
  modified_base 6: mod_base = OTHER; note = 2'-fluorouridine-3'-phosphate
  modified_base 14: mod_base = OTHER; note = 2'-fluorouridine-3'-phosphate
  modified_base 16: mod_base = OTHER; note = 2'-fluoroadenosine-3'-phosphate
  modified_base 21: mod_base = OTHER; note = 2'-O-methylguanosine-3'- phosphorothioate
  modified_base 22: mod_base = OTHER; note = 2'-O-methylguanosine-3'- phosphorothioate
  source 1..23: mol_type = other RNA
aacactgctttagtaaaaatgga

SEQ ID NO: 521 - RNA, 23 nt, synthetic construct
  misc_feature 1..23: note = Synthetic
  source 1..23: mol_type = other RNA
tccatttttactaaagcagtgtt

SEQ ID NO: 522 - RNA, 21 nt, synthetic construct
  misc_feature 1..21: note = Synthetic
  modified_base 1: mod_base = OTHER; note = 2'-O-methyladenosine-3'- phosphorothioate
  modified_base 2: mod_base = OTHER; note = 2'-O-methyluridine-3'-phosphorothioate
  modified_base 7: mod_base = OTHER; note = 2'-fluoroadenosine-3'-phosphate
  modified_base 9: mod_base = OTHER; note = 2'-fluorouridine-3'-phosphate
  modified_base 10: mod_base = OTHER; note = 2'-fluoroadenosine-3'-phosphate
  modified_base 11: mod_base = OTHER; note = 2'-fluoroadenosine-3'-phosphate
  modified_base 21: mod_base = OTHER; note = L96
  source 1..21: mol_type = other RNA
atttttactaaagcagtgttt

SEQ ID NO: 523 - RNA, 23 nt, synthetic construct
  misc_feature 1..23: note = Synthetic
  modified_base 1: mod_base = OTHER; note = 2'-O-methyladenosine-3'- phosphorothioate
  modified_base 2: mod_base = OTHER; note = 2'-fluoroadenosine-3'-phosphorothioate
  modified_base 6: mod_base = OTHER; note = 2'-fluorocytidine-3'-phosphate
  modified_base 14: mod_base = OTHER; note = 2'-fluoroguanosine-3'-phosphate
  modified_base 16: mod_base = OTHER; note = 2'-fluoroadenosine-3'-phosphate
  modified_base 21: mod_base = OTHER; note = 2'-O-methyluridine-3'- phosphorothioate
  modified_base 22: mod_base = OTHER; note = 2'-O-methylguanosine-3'- phosphorothioate
  source 1..23: mol_type = other RNA
aaacactgctttagtaaaaatgg

SEQ ID NO: 524 - RNA, 23 nt, synthetic construct
  misc_feature 1..23: note = Synthetic
  source 1..23: mol_type = other RNA
ccatttttactaaagcagtgttt

SEQ ID NO: 525 - RNA, 21 nt, synthetic construct
  misc_feature 1..21: note = Synthetic
  modified_base 1: mod_base = OTHER; note = 2'-O-methyluridine-3'- phosphorothioate
  modified_base 2: mod_base = OTHER; note = 2'-O-methyluridine-3'-phosphorothioate
  modified_base 7: mod_base = OTHER; note = 2'-fluorouridine-3'-phosphate
  modified_base 9: mod_base = OTHER; note = 2'-fluoroadenosine-3'-phosphate
  modified_base 10: mod_base = OTHER; note = 2'-fluoroadenosine-3'-phosphate
  modified_base 11: mod_base = OTHER; note = 2'-fluoroguanosine-3'-phosphate
  modified_base 21: mod_base = OTHER; note = L96
  source 1..21: mol_type = other RNA
ttttactaaagcagtgttttt

SEQ ID NO: 526 - RNA, 23 nt, synthetic construct
  misc_feature 1..23: note = Synthetic
  modified_base 1: mod_base = OTHER; note = 2'-O-methyladenosine-3'- phosphorothioate
  modified_base 2: mod_base = OTHER; note = 2'-fluoroadenosine-3'-phosphorothioate
  modified_base 6: mod_base = OTHER; note = 2'-fluorocytidine-3'-phosphate
  modified_base 14: mod_base = OTHER; note = 2'-fluorouridine-3'-phosphate
  modified_base 16: mod_base = OTHER; note = 2'-fluoroguanosine-3'-phosphate
  modified_base 21: mod_base = OTHER; note = 2'-O-methyladenosine-3'- phosphorothioate
  modified_base 22: mod_base = OTHER; note = 2'-O-methyladenosine-3'- phosphorothioate
  source 1..23: mol_type = other RNA
aaaaacactgctttagtaaaaat

SEQ ID NO: 527 - RNA, 23 nt, synthetic construct
  misc_feature 1..23: note = Synthetic
  source 1..23: mol_type = other RNA
atttttactaaagcagtgttttc

SEQ ID NO: 528 - RNA, 21 nt, synthetic construct
  misc_feature 1..21: note = Synthetic
  modified_base 1: mod_base = OTHER; note = 2'-O-methyluridine-3'- phosphorothioate
  modified_base 2: mod_base = OTHER; note = 2'-O-methyluridine-3'-phosphorothioate
  modified_base 7: mod_base = OTHER; note = 2'-fluoroadenosine-3'-phosphate
  modified_base 9: mod_base = OTHER; note = 2'-fluoroadenosine-3'-phosphate
  modified_base 10: mod_base = OTHER; note = 2'-fluoroguanosine-3'-phosphate
  modified_base 11: mod_base = OTHER; note = 2'-fluorocytidine-3'-phosphate
  modified_base 21: mod_base = OTHER; note = L96
  source 1..21: mol_type = other RNA
tttactaaagcagtgttttca

SEQ ID NO: 529 - RNA, 23 nt, synthetic construct
  misc_feature 1..23: note = Synthetic
  modified_base 1: mod_base = OTHER; note = 2'-O-methyluridine-3'-phosphorothioate
  modified_base 2: mod_base = OTHER; note = 2'-fluoroguanosine-3'-phosphorothioate
  modified_base 6: mod_base = OTHER; note = 2'-fluoroadenosine-3'-phosphate
  modified_base 14: mod_base = OTHER; note = 2'-fluorouridine-3'-phosphate
  modified_base 16: mod_base = OTHER; note = 2'-fluoroadenosine-3'-phosphate
  modified_base 21: mod_base = OTHER; note = 2'-O-methyladenosine-3'-phosphorothioate
  modified_base 22: mod_base = OTHER; note = 2'-O-methyladenosine-3'-phosphorothioate
  source 1..23: mol_type = other RNA
tgaaaacactgctttagtaaaaa

SEQ ID NO: 530 - RNA, 23 nt, synthetic construct
  misc_feature 1..23: note = Synthetic
  source 1..23: mol_type = other RNA
tttttactaaagcagtgttttca

SEQ ID NO: 531 - RNA, 21 nt, synthetic construct
  misc_feature 1..21: note = Synthetic
  modified_base 1: mod_base = OTHER; note = 2'-O-methyluridine-3'- phosphorothioate
  modified_base 2: mod_base = OTHER; note = 2'-O-methyluridine-3'-phosphorothioate
  modified_base 7: mod_base = OTHER; note = 2'-fluoroadenosine-3'-phosphate
  modified_base 9: mod_base = OTHER; note = 2'-fluoroguanosine-3'-phosphate
  modified_base 10: mod_base = OTHER; note = 2'-fluorocytidine-3'-phosphate
  modified_base 11: mod_base = OTHER; note = 2'-fluoroadenosine-3'-phosphate
  modified_base 21: mod_base = OTHER; note = L96
  source 1..21: mol_type = other RNA
ttactaaagcagtgttttcat

SEQ ID NO: 532 - RNA, 23 nt, synthetic construct
  misc_feature 1..23: note = Synthetic
  modified_base 1: mod_base = OTHER; note = 2'-O-methyladenosine-3'- phosphorothioate
  modified_base 2: mod_base = OTHER; note = 2'-fluorouridine-3'-phosphorothioate
  modified_base 6: mod_base = OTHER; note = 2'-fluoroadenosine-3'-phosphate
  modified_base 14: mod_base = OTHER; note = 2'-fluorouridine-3'-phosphate
  modified_base 16: mod_base = OTHER; note = 2'-fluorouridine-3'-phosphate
  modified_base 21: mod_base = OTHER; note = 2'-O-methyladenosine-3'-phosphorothioate
  modified_base 22: mod_base = OTHER; note = 2'-O-methyladenosine-3'- phosphorothioate
  source 1..23: mol_type = other RNA
atgaaaacactgctttagtaaaa

SEQ ID NO: 533 - RNA, 23 nt, synthetic construct
  misc_feature 1..23: note = Synthetic
  source 1..23: mol_type = other RNA
ttttactaaagcagtgttttcac

SEQ ID NO: 534 - RNA, 21 nt, synthetic construct
  misc_feature 1..21: note = Synthetic
  modified_base 1: mod_base = OTHER; note = 2'-O-methyluridine-3'- phosphorothioate
  modified_base 2: mod_base = OTHER; note = 2'-O-methyladenosine-3'-phosphorothioate
  modified_base 7: mod_base = OTHER; note = 2'-fluoroadenosine-3'-phosphate
  modified_base 9: mod_base = OTHER; note = 2'-fluorocytidine-3'-phosphate
  modified_base 10: mod_base = OTHER; note = 2'-fluoroadenosine-3'-phosphate
  modified_base 11: mod_base = OTHER; note = 2'-fluorguanosine-3'-phosphate
  modified_base 21: mod_base = OTHER; note = L96
  source 1..21: mol_type = other RNA
tactaaagcagtgttttcact

SEQ ID NO: 535 - RNA, 23 nt, synthetic construct
  misc_feature 1..23: note = Synthetic
  modified_base 1: mod_base = OTHER; note = 2'-O-methyladenosine-3'- phosphorothioate
  modified_base 2: mod_base = OTHER; note = 2'-fluoroguanosine-3'-phosphorothioate
  modified_base 6: mod_base = OTHER; note = 2'-fluoroadenosine-3'-phosphate
  modified_base 14: mod_base = OTHER; note = 2'-fluorocytidine-3'-phosphate
  modified_base 16: mod_base = OTHER; note = 2'-fluorouridine-3'-phosphate
  modified_base 21: mod_base = OTHER; note = 2'-O-methyladenosine-3'-phosphorothioate
  modified_base 22: mod_base = OTHER; note = 2'-O-methyladenosine-3'- phosphorothioate
  source 1..23: mol_type = other RNA
agtgaaaacactgctttagtaaa

SEQ ID NO: 536 - RNA, 23 nt, synthetic construct
  misc_feature 1..23: note = Synthetic
  source 1..23: mol_type = other RNA
tttactaaagcagtgttttcacc

SEQ ID NO: 537 - RNA, 21 nt, synthetic construct
  misc_feature 1..21: note = Synthetic
  modified_base 1: mod_base = OTHER; note = 2'-O-methyladenosine-3'- phosphorothioate
  modified_base 2: mod_base = OTHER; note = 2'-O-methylcytidine-3'-phosphorothioate
  modified_base 7: mod_base = OTHER; note = 2'-fluoroguanosine-3'-phosphate
  modified_base 9: mod_base = OTHER; note = 2'-fluoroadenosine-3'-phosphate
  modified_base 10: mod_base = OTHER; note = 2'-fluoroguanosine-3'-phosphate
  modified_base 11: mod_base = OTHER; note = 2'-fluorouridine-3'-phosphate
  modified_base 21: mod_base = OTHER; note = L96
  source 1..21: mol_type = other RNA
actaaagcagtgttttcacct

SEQ ID NO: 538 - RNA, 23 nt, synthetic construct
  misc_feature 1..23: note = Synthetic
  modified_base 1: mod_base = OTHER; note = 2'-O-methyladenosine-3'- phosphorothioate
  modified_base 2: mod_base = OTHER; note = 2'-fluoroguanosine-3'-phosphorothioate
  modified_base 6: mod_base = OTHER; note = 2'-fluoroadenosine-3'-phosphate
  modified_base 14: mod_base = OTHER; note = 2'-fluoroguanosine-3'-phosphate
  modified_base 16: mod_base = OTHER; note = 2'-fluorouridine-3'-phosphate
  modified_base 21: mod_base = OTHER; note = 2'-O-methyluridine-3'-phosphorothioate
  modified_base 22: mod_base = OTHER; note = 2'-O-methyladenosine-3'- phosphorothioate
  source 1..23: mol_type = other RNA
aggtgaaaacactgctttagtaa

SEQ ID NO: 539 - RNA, 23 nt, synthetic construct
  misc_feature 1..23: note = Synthetic
  source 1..23: mol_type = other RNA
ttactaaagcagtgttttcacct

SEQ ID NO: 540 - RNA, 21 nt, synthetic construct
  misc_feature 1..21: note = Synthetic
  modified_base 1: mod_base = OTHER; note = 2'-O-methylcytidine-3'- phosphorothioate
  modified_base 2: mod_base = OTHER; note = 2'-O-methyluridine-3'-phosphorothioate
  modified_base 7: mod_base = OTHER; note = 2'-fluorocytidine-3'-phosphate
  modified_base 9: mod_base = OTHER; note = 2'-fluoroguanosine-3'-phosphate
  modified_base 10: mod_base = OTHER; note = 2'-fluorouridine-3'-phosphate
  modified_base 11: mod_base = OTHER; note = 2'-fluoroguanosine-3'-phosphate
  modified_base 21: mod_base = OTHER; note = L96
  source 1..21: mol_type = other RNA
ctaaagcagtgttttcacctt

SEQ ID NO: 541 - RNA, 23 nt, synthetic construct
  misc_feature 1..23: note = Synthetic
  modified_base 1: mod_base = OTHER; note = 2'-O-methyladenosine-3'- phosphorothioate
  modified_base 2: mod_base = OTHER; note = 2'-fluoroadenosine-3'-phosphorothioate
  modified_base 6: mod_base = OTHER; note = 2'-fluoroguanosine-3'-phosphate
  modified_base 14: mod_base = OTHER; note = 2'-fluorouridine-3'-phosphate
  modified_base 16: mod_base = OTHER; note = 2'-fluorocytidine-3'-phosphate
  modified_base 21: mod_base = OTHER; note = 2'-O-methylguanosine-3'- phosphorothioate
  modified_base 22: mod_base = OTHER; note = 2'-O-methyluridine-3'- phosphorothioate
  source 1..23: mol_type = other RNA
aaggtgaaaacactgctttagta

SEQ ID NO: 542 - RNA, 23 nt, synthetic construct
  misc_feature 1..23: note = Synthetic
  source 1..23: mol_type = other RNA
tactaaagcagtgttttcacctc

SEQ ID NO: 543 - RNA, 21 nt, synthetic construct
  misc_feature 1..21: note = Synthetic
  modified_base 1: mod_base = OTHER; note = 2'-O-methyluridine-3'- phosphorothioate
  modified_base 2: mod_base = OTHER; note = 2'-O-methyladenosine-3'-phosphorothioate
  modified_base 7: mod_base = OTHER; note = 2'-fluoroadenosine-3'-phosphate
  modified_base 9: mod_base = OTHER; note = 2'-fluorouridine-3'-phosphate
  modified_base 10: mod_base = OTHER; note = 2'-fluoroguanosine-3'-phosphate
  modified_base 11: mod_base = OTHER; note = 2'-fluorouridine-3'-phosphate
  modified_base 21: mod_base = OTHER; note = L96
  source 1..21: mol_type = other RNA
taaagcagtgttttcacctca

SEQ ID NO: 544 - RNA, 23 nt, synthetic construct
  misc_feature 1..23: note = Synthetic
  modified_base 1: mod_base = OTHER; note = 2'-O-methyluridine-3'-phosphorothioate
  modified_base 2: mod_base = OTHER; note = 2'-fluoroguanosine-3'-phosphorothioate
  modified_base 6: mod_base = OTHER; note = 2'-fluorouridine-3'-phosphate
  modified_base 14: mod_base = OTHER; note = 2'-fluorocytidine-3'-phosphate
  modified_base 16: mod_base = OTHER; note = 2'-fluoroguanosine-3'-phosphate
  modified_base 21: mod_base = OTHER; note = 2'-O-methyladenosine-3'-phosphorothioate
  modified_base 22: mod_base = OTHER; note = 2'-O-methylguanosine-3'-phosphorothioate
  source 1..23: mol_type = other RNA
tgaggtgaaaacactgctttagt

SEQ ID NO: 545 - RNA, 23 nt, synthetic construct
  misc_feature 1..23: note = Synthetic
  source 1..23: mol_type = other RNA
actaaagcagtgttttcacctca

SEQ ID NO: 546 - RNA, 21 nt, synthetic construct
  misc_feature 1..21: note = Synthetic
  modified_base 1: mod_base = OTHER; note = 2'-O-methyladenosine-3'- phosphorothioate
  modified_base 2: mod_base = OTHER; note = 2'-O-methyladenosine-3'-phosphorothioate
  modified_base 7: mod_base = OTHER; note = 2'-fluoroguanosine-3'-phosphate
  modified_base 9: mod_base = OTHER; note = 2'-fluoroguanosine-3'-phosphate
  modified_base 10: mod_base = OTHER; note = 2'-fluorouridine-3'-phosphate
  modified_base 11: mod_base = OTHER; note = 2'-fluorouridine-3'-phosphate
  modified_base 21: mod_base = OTHER; note = L96
  source 1..21: mol_type = other RNA
aaagcagtgttttcacctcat

SEQ ID NO: 547 - RNA, 23 nt, synthetic construct
  misc_feature 1..23: note = Synthetic
  modified_base 1: mod_base = OTHER; note = 2'-O-methyladenosine-3'- phosphorothioate
  modified_base 2: mod_base = OTHER; note = 2'-fluorouridine-3'-phosphorothioate
  modified_base 6: mod_base = OTHER; note = 2'-fluoroguanosine-3'-phosphate
  modified_base 14: mod_base = OTHER; note = 2'-fluoroadenosine-3'-phosphate
  modified_base 16: mod_base = OTHER; note = 2'-fluorouridine-3'-phosphate
  modified_base 21: mod_base = OTHER; note = 2'-O-methyluridine-3'-phosphorothioate
  modified_base 22: mod_base = OTHER; note = 2'-O-methyladenosine-3'- phosphorothioate
  source 1..23: mol_type = other RNA
atgaggtgaaaacactgctttag

SEQ ID NO: 548 - RNA, 23 nt, synthetic construct
  misc_feature 1..23: note = Synthetic
  source 1..23: mol_type = other RNA
ctaaagcagtgttttcacctcat

SEQ ID NO: 549 - RNA, 21 nt, synthetic construct
  misc_feature 1..21: note = Synthetic
  modified_base 1: mod_base = OTHER; note = 2'-O-methyladenosine-3'- phosphorothioate
  modified_base 2: mod_base = OTHER; note = 2'-O-methyladenosine-3'-phosphorothioate
  modified_base 7: mod_base = OTHER; note = 2'-fluorouridine-3'-phosphate
  modified_base 9: mod_base = OTHER; note = 2'-fluorouridine-3'-phosphate
  modified_base 10: mod_base = OTHER; note = 2'-fluorouridine-3'-phosphate
  modified_base 11: mod_base = OTHER; note = 2'-fluorouridine-3'-phosphate
  modified_base 21: mod_base = OTHER; note = L96
  source 1..21: mol_type = other RNA
aagcagtgttttcacctcata

SEQ ID NO: 550 - RNA, 23 nt, synthetic construct
  misc_feature 1..23: note = Synthetic
  modified_base 1: mod_base = OTHER; note = 2'-O-methyluridine-3'- phosphorothioate
  modified_base 2: mod_base = OTHER; note = 2'-fluoroadenosine-3'-phosphorothioate
  modified_base 6: mod_base = OTHER; note = 2'-fluoroguanosine-3'-phosphate
  modified_base 14: mod_base = OTHER; note = 2'-fluorocytidine-3'-phosphate
  modified_base 16: mod_base = OTHER; note = 2'-fluorocytidine-3'-phosphate
  modified_base 21: mod_base = OTHER; note = 2'-O-methyluridine-3'-phosphorothioate
  modified_base 22: mod_base = OTHER; note = 2'-O-methyluridine-3'- phosphorothioate
  source 1..23: mol_type = other RNA
tatgaggtgaaaacactgcttta

SEQ ID NO: 551 - RNA, 23 nt, synthetic construct
  misc_feature 1..23: note = Synthetic
  source 1..23: mol_type = other RNA
taaagcagtgttttcacctcata

SEQ ID NO: 552 - RNA, 21 nt, synthetic construct
  misc_feature 1..21: note = Synthetic
  modified_base 1: mod_base = OTHER; note = 2'-O-methyladenosine-3'- phosphorothioate
  modified_base 2: mod_base = OTHER; note = 2'-O-methylguanosine-3'-phosphorothioate
  modified_base 7: mod_base = OTHER; note = 2'-fluoroguanosine-3'-phosphate
  modified_base 9: mod_base = OTHER; note = 2'-fluorouridine-3'-phosphate
  modified_base 10: mod_base = OTHER; note = 2'-fluorouridine-3'-phosphate
  modified_base 11: mod_base = OTHER; note = 2'-fluorouridine-3'-phosphate
  modified_base 21: mod_base = OTHER; note = L96
  source 1..21: mol_type = other RNA
agcagtgttttcacctcatat

SEQ ID NO: 553 - RNA, 23 nt, synthetic construct
  misc_feature 1..23: note = Synthetic
  modified_base 1: mod_base = OTHER; note = 2'-O-methyladenosine-3'- phosphorothioate
  modified_base 2: mod_base = OTHER; note = 2'-fluorouridine-3'-phosphorothioate
  modified_base 6: mod_base = OTHER; note = 2'-fluoroguanosine-3'-phosphate
  modified_base 14: mod_base = OTHER; note = 2'-fluoroadenosine-3'-phosphate
  modified_base 16: mod_base = OTHER; note = 2'-fluoroadenosine-3'-phosphate
  modified_base 21: mod_base = OTHER; note = 2'-O-methyluridine-3'-phosphorothioate
  modified_base 22: mod_base = OTHER; note = 2'-O-methyluridine-3'- phosphorothioate
  source 1..23: mol_type = other RNA
atatgaggtgaaaacactgcttt

SEQ ID NO: 554 - RNA, 23 nt, synthetic construct
  misc_feature 1..23: note = Synthetic
  source 1..23: mol_type = other RNA
aaagcagtgttttcacctcatat

SEQ ID NO: 555 - RNA, 21 nt, synthetic construct
  misc_feature 1..21: note = Synthetic
  modified_base 1: mod_base = OTHER; note = 2'-O-methyladenosine-3'- phosphorothioate
  modified_base 2: mod_base = OTHER; note = 2'-O-methylguanosine-3'-phosphorothioate
  modified_base 7: mod_base = OTHER; note = 2'-fluorocytidine-3'-phosphate
  modified_base 9: mod_base = OTHER; note = 2'-fluoroadenosine-3'-phosphate
  modified_base 10: mod_base = OTHER; note = 2'-fluoroguanosine-3'-phosphate
  modified_base 11: mod_base = OTHER; note = 2'-fluoroguanosine-3'-phosphate
  modified_base 21: mod_base = OTHER; note = L96
  source 1..21: mol_type = other RNA
agaagtccaggcagagacaat

SEQ ID NO: 556 - RNA, 23 nt, synthetic construct
  misc_feature 1..23: note = Synthetic
  modified_base 1: mod_base = OTHER; note = 2'-O-methyladenosine-3'- phosphorothioate
  modified_base 2: mod_base = OTHER; note = 2'-fluorouridine-3'-phosphorothioate
  modified_base 6: mod_base = OTHER; note = 2'-fluorocytidine-3'-phosphate
  modified_base 14: mod_base = OTHER; note = 2'-fluoroguanosine-3'-phosphate
  modified_base 16: mod_base = OTHER; note = 2'-fluoroadenosine-3'-phosphate
  modified_base 21: mod_base = OTHER; note = 2'-O-methyluridine-3'-phosphorothioate
  modified_base 22: mod_base = OTHER; note = 2'-O-methyladenosine-3'- phosphorothioate
  source 1..23: mol_type = other RNA
attgtctctgcctggacttctaa

SEQ ID NO: 557 - RNA, 23 nt, synthetic construct
  misc_feature 1..23: note = Synthetic
  source 1..23: mol_type = other RNA
ttagaagtccaggcagagacaat

SEQ ID NO: 558 - RNA, 21 nt, synthetic construct
  misc_feature 1..21: note = Synthetic
  modified_base 1: mod_base = OTHER; note = 2'-O-methylguanosine-3'- phosphorothioate
  modified_base 2: mod_base = OTHER; note = 2'-O-methyladenosine-3'-phosphorothioate
  modified_base 7: mod_base = OTHER; note = 2'-fluorocytidine-3'-phosphate
  modified_base 9: mod_base = OTHER; note = 2'-fluoroguanosine-3'-phosphate
  modified_base 10: mod_base = OTHER; note = 2'-fluoroguanosine-3'-phosphate
  modified_base 11: mod_base = OTHER; note = 2'-fluorocytidine-3'-phosphate
  modified_base 21: mod_base = OTHER; note = L96
  source 1..21: mol_type = other RNA
gaagtccaggcagagacaata

SEQ ID NO: 559 - RNA, 23 nt, synthetic construct
  misc_feature 1..23: note = Synthetic
  modified_base 1: mod_base = OTHER; note = 2'-O-methyluridine-3'- phosphorothioate
  modified_base 2: mod_base = OTHER; note = 2'-fluoroadenosine-3'-phosphorothioate
  modified_base 6: mod_base = OTHER; note = 2'-fluorouridine-3'-phosphate
  modified_base 14: mod_base = OTHER; note = 2'-fluorouridine-3'-phosphate
  modified_base 16: mod_base = OTHER; note = 2'-fluoroguanosine-3'-phosphate
  modified_base 21: mod_base = OTHER; note = 2'-O-methylcytidine-3'-phosphorothioate
  modified_base 22: mod_base = OTHER; note = 2'-O-methyluridine-3'- phosphorothioate
  source 1..23: mol_type = other RNA
tattgtctctgcctggacttcta

SEQ ID NO: 560 - RNA, 23 nt, synthetic construct
  misc_feature 1..23: note = Synthetic
  source 1..23: mol_type = other RNA
tagaagtccaggcagagacaata

SEQ ID NO: 561 - RNA, 21 nt, synthetic construct
  misc_feature 1..21: note = Synthetic
  modified_base 1: mod_base = OTHER; note = 2'-O-methyladenosine-3'- phosphorothioate
  modified_base 2: mod_base = OTHER; note = 2'-O-methylguanosine-3'-phosphorothioate
  modified_base 7: mod_base = OTHER; note = 2'-fluoroguanosine-3'-phosphate
  modified_base 9: mod_base = OTHER; note = 2'-fluorocytidine-3'-phosphate
  modified_base 10: mod_base = OTHER; note = 2'-fluoroadenosine-3'-phosphate
  modified_base 11: mod_base = OTHER; note = 2'-fluoroguanosine-3'-phosphate
  modified_base 21: mod_base = OTHER; note = L96
  source 1..21: mol_type = other RNA
agtccaggcagagacaataaa

SEQ ID NO: 562 - RNA, 23 nt, synthetic construct
  misc_feature 1..23: note = Synthetic
  modified_base 1: mod_base = OTHER; note = 2'-O-methyluridine-3'- phosphorothioate
  modified_base 2: mod_base = OTHER; note = 2'-fluorouridine-3'-phosphorothioate
  modified_base 6: mod_base = OTHER; note = 2'-fluorouridine-3'-phosphate
  modified_base 14: mod_base = OTHER; note = 2'-fluorocytidine-3'-phosphate
  modified_base 16: mod_base = OTHER; note = 2'-fluorouridine-3'-phosphate
  modified_base 21: mod_base = OTHER; note = 2'-O-methyluridine-3'-phosphorothioate
  modified_base 22: mod_base = OTHER; note = 2'-O-methyluridine-3'- phosphorothioate
  source 1..23: mol_type = other RNA
tttattgtctctgcctggacttc

SEQ ID NO: 563 - RNA, 23 nt, synthetic construct
  misc_feature 1..23: note = Synthetic
  source 1..23: mol_type = other RNA
gaagtccaggcagagacaataaa

SEQ ID NO: 564 - RNA, 21 nt, synthetic construct
  misc_feature 1..21: note = Synthetic
  modified_base 1: mod_base = OTHER; note = 2'-O-methylguanosine-3'- phosphorothioate
  modified_base 2: mod_base = OTHER; note = 2'-O-methyluridine-3'-phosphorothioate
  modified_base 7: mod_base = OTHER; note = 2'-fluoroguanosine-3'-phosphate
  modified_base 9: mod_base = OTHER; note = 2'-fluoroadenosine-3'-phosphate
  modified_base 10: mod_base = OTHER; note = 2'-fluoroguanosine-3'-phosphate
  modified_base 11: mod_base = OTHER; note = 2'-fluoroadenosine-3'-phosphate
  modified_base 21: mod_base = OTHER; note = L96
  source 1..21: mol_type = other RNA
gtccaggcagagacaataaaa

SEQ ID NO: 565 - RNA, 23 nt, synthetic construct
  misc_feature 1..23: note = Synthetic
  modified_base 1: mod_base = OTHER; note = 2'-O-methyluridine-3'- phosphorothioate
  modified_base 2: mod_base = OTHER; note = 2'-fluorouridine-3'-phosphorothioate
  modified_base 6: mod_base = OTHER; note = 2'-fluorouridine-3'-phosphate
  modified_base 14: mod_base = OTHER; note = 2'-fluoroguanosine-3'-phosphate
  modified_base 16: mod_base = OTHER; note = 2'-fluorocytidine-3'-phosphate
  modified_base 21: mod_base = OTHER; note = 2'-O-methylcytidine-3'-phosphorothioate
  modified_base 22: mod_base = OTHER; note = 2'-O-methyluridine-3'- phosphorothioate
  source 1..23: mol_type = other RNA
ttttattgtctctgcctggactt

SEQ ID NO: 566 - RNA, 23 nt, synthetic construct
  misc_feature 1..23: note = Synthetic
  source 1..23: mol_type = other RNA
aagtccaggcagagacaataaaa

SEQ ID NO: 567 - RNA, 21 nt, synthetic construct
  misc_feature 1..21: note = Synthetic
  modified_base 1: mod_base = OTHER; note = 2'-O-methyluridine-3'- phosphorothioate
  modified_base 2: mod_base = OTHER; note = 2'-O-methylcytidine-3'-phosphorothioate
  modified_base 7: mod_base = OTHER; note = 2'-fluorocytidine-3'-phosphate
  modified_base 9: mod_base = OTHER; note = 2'-fluoroguanosine-3'-phosphate
  modified_base 10: mod_base = OTHER; note = 2'-fluoroadenosine-3'-phosphate
  modified_base 11: mod_base = OTHER; note = 2'-fluoroguanosine-3'-phosphate
  modified_base 21: mod_base = OTHER; note = L96
  source 1..21: mol_type = other RNA
tccaggcagagacaataaaat

SEQ ID NO: 568 - RNA, 23 nt, synthetic construct
  misc_feature 1..23: note = Synthetic
  modified_base 1: mod_base = OTHER; note = 2'-O-methyladenosine-3'- phosphorothioate
  modified_base 2: mod_base = OTHER; note = 2'-fluorouridine-3'-phosphorothioate
  modified_base 6: mod_base = OTHER; note = 2'-fluoroadenosine-3'-phosphate
  modified_base 14: mod_base = OTHER; note = 2'-fluorouridine-3'-phosphate
  modified_base 16: mod_base = OTHER; note = 2'-fluorocytidine-3'-phosphate
  modified_base 21: mod_base = OTHER; note = 2'-O-methyladenosine-3'-phosphorothioate
  modified_base 22: mod_base = OTHER; note = 2'-O-methylcytidine-3'- phosphorothioate
  source 1..23: mol_type = other RNA
attttattgtctctgcctggact

SEQ ID NO: 569 - RNA, 23 nt, synthetic construct
  misc_feature 1..23: note = Synthetic
  source 1..23: mol_type = other RNA
agtccaggcagagacaataaaac

SEQ ID NO: 570 - RNA, 21 nt, synthetic construct
  misc_feature 1..21: note = Synthetic
  modified_base 1: mod_base = OTHER; note = 2'-O-methylcytidine-3'- phosphorothioate
  modified_base 2: mod_base = OTHER; note = 2'-O-methylcytidine-3'-phosphorothioate
  modified_base 7: mod_base = OTHER; note = 2'-fluoroadenosine-3'-phosphate
  modified_base 9: mod_base = OTHER; note = 2'-fluoroadenosine-3'-phosphate
  modified_base 10: mod_base = OTHER; note = 2'-fluoroguanosine-3'-phosphate
  modified_base 11: mod_base = OTHER; note = 2'-fluoroadenosine-3'-phosphate
  modified_base 21: mod_base = OTHER; note = L96
  source 1..21: mol_type = other RNA
ccaggcagagacaataaaaca

SEQ ID NO: 571 - RNA, 23 nt, synthetic construct
  misc_feature 1..23: note = Synthetic
  modified_base 1: mod_base = OTHER; note = 2'-O-methyluridine-3'-phosphorothioate
  modified_base 2: mod_base = OTHER; note = 2'-fluoroguanosine-3'-phosphorothioate
  modified_base 6: mod_base = OTHER; note = 2'-fluorouridine-3'-phosphate
  modified_base 14: mod_base = OTHER; note = 2'-fluorocytidine-3'-phosphate
  modified_base 16: mod_base = OTHER; note = 2'-fluoroguanosine-3'-phosphate
  modified_base 21: mod_base = OTHER; note = 2'-O-methylguanosine-3'-phosphorothioate
  modified_base 22: mod_base = OTHER; note = 2'-O-methyladenosine-3'-phosphorothioate
  source 1..23: mol_type = other RNA
tgttttattgtctctgcctggac

SEQ ID NO: 572 - RNA, 23 nt, synthetic construct
  misc_feature 1..23: note = Synthetic
  source 1..23: mol_type = other RNA
gtccaggcagagacaataaaaca

SEQ ID NO: 573 - RNA, 21 nt, synthetic construct
  misc_feature 1..21: note = Synthetic
  modified_base 1: mod_base = OTHER; note = 2'-O-methylcytidine-3'- phosphorothioate
  modified_base 2: mod_base = OTHER; note = 2'-O-methyladenosine-3'-phosphorothioate
  modified_base 7: mod_base = OTHER; note = 2'-fluoroguanosine-3'-phosphate
  modified_base 9: mod_base = OTHER; note = 2'-fluoroguanosine-3'-phosphate
  modified_base 10: mod_base = OTHER; note = 2'-fluoroadenosine-3'-phosphate
  modified_base 11: mod_base = OTHER; note = 2'-fluorocytidine-3'-phosphate
  modified_base 21: mod_base = OTHER; note = L96
  source 1..21: mol_type = other RNA
caggcagagacaataaaacat

SEQ ID NO: 574 - RNA, 23 nt, synthetic construct
  misc_feature 1..23: note = Synthetic
  modified_base 1: mod_base = OTHER; note = 2'-O-methyladenosine-3'- phosphorothioate
  modified_base 2: mod_base = OTHER; note = 2'-fluorouridine-3'-phosphorothioate
  modified_base 6: mod_base = OTHER; note = 2'-fluorouridine-3'-phosphate
  modified_base 14: mod_base = OTHER; note = 2'-fluorouridine-3'-phosphate
  modified_base 16: mod_base = OTHER; note = 2'-fluorouridine-3'-phosphate
  modified_base 21: mod_base = OTHER; note = 2'-O-methylguanosine-3'-phosphorothioate
  modified_base 22: mod_base = OTHER; note = 2'-O-methylguanosine-3'- phosphorothioate
  source 1..23: mol_type = other RNA
atgttttattgtctctgcctgga

SEQ ID NO: 575 - RNA, 23 nt, synthetic construct
  misc_feature 1..23: note = Synthetic
  source 1..23: mol_type = other RNA
tccaggcagagacaataaaacat

SEQ ID NO: 576 - RNA, 21 nt, synthetic construct
  misc_feature 1..21: note = Synthetic
  modified_base 1: mod_base = OTHER; note = 2'-O-methyladenosine-3'- phosphorothioate
  modified_base 2: mod_base = OTHER; note = 2'-O-methylguanosine-3'-phosphorothioate
  modified_base 7: mod_base = OTHER; note = 2'-fluoroadenosine-3'-phosphate
  modified_base 9: mod_base = OTHER; note = 2'-fluoroadenosine-3'-phosphate
  modified_base 10: mod_base = OTHER; note = 2'-fluorocytidine-3'-phosphate
  modified_base 11: mod_base = OTHER; note = 2'-fluoroadenosine-3'-phosphate
  modified_base 21: mod_base = OTHER; note = L96
  source 1..21: mol_type = other RNA
aggcagagacaataaaacatt

SEQ ID NO: 577 - RNA, 23 nt, synthetic construct
  misc_feature 1..23: note = Synthetic
  modified_base 1: mod_base = OTHER; note = 2'-O-methyladenosine-3'- phosphorothioate
  modified_base 2: mod_base = OTHER; note = 2'-fluoroadenosine-3'-phosphorothioate
  modified_base 6: mod_base = OTHER; note = 2'-fluorouridine-3'-phosphate
  modified_base 14: mod_base = OTHER; note = 2'-fluorocytidine-3'-phosphate
  modified_base 16: mod_base = OTHER; note = 2'-fluorocytidine-3'-phosphate
  modified_base 21: mod_base = OTHER; note = 2'-O-methyluridine-3'- phosphorothioate
  modified_base 22: mod_base = OTHER; note = 2'-O-methylguanosine-3'- phosphorothioate
  source 1..23: mol_type = other RNA
aatgttttattgtctctgcctgg

SEQ ID NO: 578 - RNA, 23 nt, synthetic construct
  misc_feature 1..23: note = Synthetic
  source 1..23: mol_type = other RNA
ccaggcagagacaataaaacatt

SEQ ID NO: 579 - RNA, 21 nt, synthetic construct
  misc_feature 1..21: note = Synthetic
  modified_base 1: mod_base = OTHER; note = 2'-O-methylguanosine-3'- phosphorothioate
  modified_base 2: mod_base = OTHER; note = 2'-O-methylguanosine-3'-phosphorothioate
  modified_base 7: mod_base = OTHER; note = 2'-fluoroguanosine-3'-phosphate
  modified_base 9: mod_base = OTHER; note = 2'-fluorocytidine-3'-phosphate
  modified_base 10: mod_base = OTHER; note = 2'-fluoroadenosine-3'-phosphate
  modified_base 11: mod_base = OTHER; note = 2'-fluoroadenosine-3'-phosphate
  modified_base 21: mod_base = OTHER; note = L96
  source 1..21: mol_type = other RNA
ggcagagacaataaaacattt

SEQ ID NO: 580 - RNA, 23 nt, synthetic construct
  misc_feature 1..23: note = Synthetic
  modified_base 1: mod_base = OTHER; note = 2'-O-methyladenosine-3'- phosphorothioate
  modified_base 2: mod_base = OTHER; note = 2'-fluoroadenosine-3'-phosphorothioate
  modified_base 6: mod_base = OTHER; note = 2'-fluorouridine-3'-phosphate
  modified_base 14: mod_base = OTHER; note = 2'-fluorouridine-3'-phosphate
  modified_base 16: mod_base = OTHER; note = 2'-fluorouridine-3'-phosphate
  modified_base 21: mod_base = OTHER; note = 2'-O-methylcytidine-3'- phosphorothioate
  modified_base 22: mod_base = OTHER; note = 2'-O-methyluridine-3'- phosphorothioate
  source 1..23: mol_type = other RNA
aaatgttttattgtctctgcctg

SEQ ID NO: 581 - RNA, 23 nt, synthetic construct
  misc_feature 1..23: note = Synthetic
  source 1..23: mol_type = other RNA
caggcagagacaataaaacattc

SEQ ID NO: 582 - RNA, 21 nt, synthetic construct
  misc_feature 1..21: note = Synthetic
  modified_base 1: mod_base = OTHER; note = 2'-O-methylguanosine-3'- phosphorothioate
  modified_base 2: mod_base = OTHER; note = 2'-O-methylcytidine-3'-phosphorothioate
  modified_base 7: mod_base = OTHER; note = 2'-fluoroadenosine-3'-phosphate
  modified_base 9: mod_base = OTHER; note = 2'-fluoroadenosine-3'-phosphate
  modified_base 10: mod_base = OTHER; note = 2'-fluoroadenosine-3'-phosphate
  modified_base 11: mod_base = OTHER; note = 2'-fluorouridine-3'-phosphate
  modified_base 21: mod_base = OTHER; note = L96
  source 1..21: mol_type = other RNA
gcagagacaataaaacattct

SEQ ID NO: 583 - RNA, 23 nt, synthetic construct
  misc_feature 1..23: note = Synthetic
  modified_base 1: mod_base = OTHER; note = 2'-O-methyladenosine-3'- phosphorothioate
  modified_base 2: mod_base = OTHER; note = 2'-fluoroguanosine-3'-phosphorothioate
  modified_base 6: mod_base = OTHER; note = 2'-fluoroguanosine-3'-phosphate
  modified_base 14: mod_base = OTHER; note = 2'-fluoroguanosine-3'-phosphate
  modified_base 16: mod_base = OTHER; note = 2'-fluorocytidine-3'-phosphate
  modified_base 21: mod_base = OTHER; note = 2'-O-methylguanosine-3'-phosphorothioate
  modified_base 22: mod_base = OTHER; note = 2'-O-methylcytidine-3'- phosphorothioate
  source 1..23: mol_type = other RNA
agaatgttttattgtctctgcct

SEQ ID NO: 584 - RNA, 23 nt, synthetic construct
  misc_feature 1..23: note = Synthetic
  source 1..23: mol_type = other RNA
aggcagagacaataaaacattcc

SEQ ID NO: 585 - RNA, 21 nt, synthetic construct
  misc_feature 1..21: note = Synthetic
  modified_base 1: mod_base = OTHER; note = 2'-O-methyladenosine-3'- phosphorothioate
  modified_base 2: mod_base = OTHER; note = 2'-O-methylguanosine-3'-phosphorothioate
  modified_base 7: mod_base = OTHER; note = 2'-fluoroadenosine-3'-phosphate
  modified_base 9: mod_base = OTHER; note = 2'-fluorouridine-3'-phosphate
  modified_base 10: mod_base = OTHER; note = 2'-fluoroadenosine-3'-phosphate
  modified_base 11: mod_base = OTHER; note = 2'-fluoroadenosine-3'-phosphate
  modified_base 21: mod_base = OTHER; note = L96
  source 1..21: mol_type = other RNA
agagacaataaaacattcctt

SEQ ID NO: 586 - RNA, 23 nt, synthetic construct
  misc_feature 1..23: note = Synthetic
  modified_base 1: mod_base = OTHER; note = 2'-O-methyladenosine-3'- phosphorothioate
  modified_base 2: mod_base = OTHER; note = 2'-fluoroadenosine-3'-phosphorothioate
  modified_base 6: mod_base = OTHER; note = 2'-fluoroadenosine-3'-phosphate
  modified_base 14: mod_base = OTHER; note = 2'-fluorouridine-3'-phosphate
  modified_base 16: mod_base = OTHER; note = 2'-fluoroguanosine-3'-phosphate
  modified_base 21: mod_base = OTHER; note = 2'-O-methyluridine-3'- phosphorothioate
  modified_base 22: mod_base = OTHER; note = 2'-O-methylguanosine-3'- phosphorothioate
  source 1..23: mol_type = other RNA
aaggaatgttttattgtctctgc

SEQ ID NO: 587 - RNA, 23 nt, synthetic construct
  misc_feature 1..23: note = Synthetic
  source 1..23: mol_type = other RNA
gcagagacaataaaacattcctg

SEQ ID NO: 588 - RNA, 21 nt, synthetic construct
  misc_feature 1..21: note = Synthetic
  modified_base 1: mod_base = OTHER; note = 2'-O-methylguanosine-3'- phosphorothioate
  modified_base 2: mod_base = OTHER; note = 2'-O-methyladenosine-3'-phosphorothioate
  modified_base 7: mod_base = OTHER; note = 2'-fluoroadenosine-3'-phosphate
  modified_base 9: mod_base = OTHER; note = 2'-fluoroadenosine-3'-phosphate
  modified_base 10: mod_base = OTHER; note = 2'-fluoroadenosine-3'-phosphate
  modified_base 11: mod_base = OTHER; note = 2'-fluoroadenosine-3'-phosphate
  modified_base 21: mod_base = OTHER; note = L96
  source 1..21: mol_type = other RNA
gagacaataaaacattcctgt

SEQ ID NO: 589 - RNA, 23 nt, synthetic construct
  misc_feature 1..23: note = Synthetic
  modified_base 1: mod_base = OTHER; note = 2'-O-methyladenosine-3'- phosphorothioate
  modified_base 2: mod_base = OTHER; note = 2'-fluorocytidine-3'-phosphorothioate
  modified_base 6: mod_base = OTHER; note = 2'-fluoroadenosine-3'-phosphate
  modified_base 14: mod_base = OTHER; note = 2'-fluoroadenosine-3'-phosphate
  modified_base 16: mod_base = OTHER; note = 2'-fluorouridine-3'-phosphate
  modified_base 21: mod_base = OTHER; note = 2'-O-methylcytidine-3'-phosphorothioate
  modified_base 22: mod_base = OTHER; note = 2'-O-methyluridine-3'- phosphorothioate
  source 1..23: mol_type = other RNA
acaggaatgttttattgtctctg

SEQ ID NO: 590 - RNA, 23 nt, synthetic construct
  misc_feature 1..23: note = Synthetic
  source 1..23: mol_type = other RNA
cagagacaataaaacattcctgt

SEQ ID NO: 591 - RNA, 21 nt, synthetic construct
  misc_feature 1..21: note = Synthetic
  modified_base 1: mod_base = OTHER; note = 2'-O-methyladenosine-3'- phosphorothioate
  modified_base 2: mod_base = OTHER; note = 2'-O-methylguanosine-3'-phosphorothioate
  modified_base 7: mod_base = OTHER; note = 2'-fluorouridine-3'-phosphate
  modified_base 9: mod_base = OTHER; note = 2'-fluoroadenosine-3'-phosphate
  modified_base 10: mod_base = OTHER; note = 2'-fluoroadenosine-3'-phosphate
  modified_base 11: mod_base = OTHER; note = 2'-fluoroadenosine-3'-phosphate
  modified_base 21: mod_base = OTHER; note = L96
  source 1..21: mol_type = other RNA
agacaataaaacattcctgtt

SEQ ID NO: 592 - RNA, 23 nt, synthetic construct
  misc_feature 1..23: note = Synthetic
  modified_base 1: mod_base = OTHER; note = 2'-O-methyladenosine-3'- phosphorothioate
  modified_base 2: mod_base = OTHER; note = 2'-fluoroadenosine-3'-phosphorothioate
  modified_base 6: mod_base = OTHER; note = 2'-fluoroguanosine-3'-phosphate
  modified_base 14: mod_base = OTHER; note = 2'-fluorouridine-3'-phosphate
  modified_base 16: mod_base = OTHER; note = 2'-fluorouridine-3'-phosphate
  modified_base 21: mod_base = OTHER; note = 2'-O-methyluridine-3'- phosphorothioate
  modified_base 22: mod_base = OTHER; note = 2'-O-methylcytidine-3'- phosphorothioate
  source 1..23: mol_type = other RNA
aacaggaatgttttattgtctct

SEQ ID NO: 593 - RNA, 23 nt, synthetic construct
  misc_feature 1..23: note = Synthetic
  source 1..23: mol_type = other RNA
agagacaataaaacattcctgtg

SEQ ID NO: 594 - RNA, 21 nt, synthetic construct
  misc_feature 1..21: note = Synthetic
  modified_base 1: mod_base = OTHER; note = 2'-O-methylguanosine-3'- phosphorothioate
  modified_base 2: mod_base = OTHER; note = 2'-O-methyladenosine-3'-phosphorothioate
  modified_base 7: mod_base = OTHER; note = 2'-fluoroadenosine-3'-phosphate
  modified_base 9: mod_base = OTHER; note = 2'-fluoroadenosine-3'-phosphate
  modified_base 10: mod_base = OTHER; note = 2'-fluoroadenosine-3'-phosphate
  modified_base 11: mod_base = OTHER; note = 2'-fluorocytidine-3'-phosphate
  modified_base 21: mod_base = OTHER; note = L96
  source 1..21: mol_type = other RNA
gacaataaaacattcctgtga

SEQ ID NO: 595 - RNA, 23 nt, synthetic construct
  misc_feature 1..23: note = Synthetic
  modified_base 1: mod_base = OTHER; note = 2'-O-methyluridine-3'-phosphorothioate
  modified_base 2: mod_base = OTHER; note = 2'-fluorocytidine-3'-phosphorothioate
  modified_base 6: mod_base = OTHER; note = 2'-fluoroguanosine-3'-phosphate
  modified_base 14: mod_base = OTHER; note = 2'-fluorouridine-3'-phosphate
  modified_base 16: mod_base = OTHER; note = 2'-fluoroadenosine-3'-phosphate
  modified_base 21: mod_base = OTHER; note = 2'-O-methylcytidine-3'-phosphorothioate
  modified_base 22: mod_base = OTHER; note = 2'-O-methyluridine-3'-phosphorothioate
  source 1..23: mol_type = other RNA
tcacaggaatgttttattgtctc

SEQ ID NO: 596 - RNA, 23 nt, synthetic construct
  misc_feature 1..23: note = Synthetic
  source 1..23: mol_type = other RNA
gagacaataaaacattcctgtga

SEQ ID NO: 597 - RNA, 21 nt, synthetic construct
  misc_feature 1..21: note = Synthetic
  modified_base 1: mod_base = OTHER; note = 2'-O-methyladenosine-3'- phosphorothioate
  modified_base 2: mod_base = OTHER; note = 2'-O-methylcytidine-3'-phosphorothioate
  modified_base 7: mod_base = OTHER; note = 2'-fluoroadenosine-3'-phosphate
  modified_base 9: mod_base = OTHER; note = 2'-fluoroadenosine-3'-phosphate
  modified_base 10: mod_base = OTHER; note = 2'-fluorocytidine-3'-phosphate
  modified_base 11: mod_base = OTHER; note = 2'-fluoroadenosine-3'-phosphate
  modified_base 21: mod_base = OTHER; note = L96
  source 1..21: mol_type = other RNA
acaataaaacattcctgtgaa

SEQ ID NO: 598 - RNA, 23 nt, synthetic construct
  misc_feature 1..23: note = Synthetic
  modified_base 1: mod_base = OTHER; note = 2'-O-methyluridine-3'- phosphorothioate
  modified_base 2: mod_base = OTHER; note = 2'-fluorouridine-3'-phosphorothioate
  modified_base 6: mod_base = OTHER; note = 2'-fluoroadenosine-3'-phosphate
  modified_base 14: mod_base = OTHER; note = 2'-fluorouridine-3'-phosphate
  modified_base 16: mod_base = OTHER; note = 2'-fluorouridine-3'-phosphate
  modified_base 21: mod_base = OTHER; note = 2'-O-methyluridine-3'-phosphorothioate
  modified_base 22: mod_base = OTHER; note = 2'-O-methylcytidine-3'- phosphorothioate
  source 1..23: mol_type = other RNA
ttcacaggaatgttttattgtct

SEQ ID NO: 599 - RNA, 23 nt, synthetic construct
  misc_feature 1..23: note = Synthetic
  source 1..23: mol_type = other RNA
agacaataaaacattcctgtgaa

SEQ ID NO: 600 - RNA, 21 nt, synthetic construct
  misc_feature 1..21: note = Synthetic
  modified_base 1: mod_base = OTHER; note = 2'-O-methyladenosine-3'- phosphorothioate
  modified_base 2: mod_base = OTHER; note = 2'-O-methyladenosine-3'-phosphorothioate
  modified_base 7: mod_base = OTHER; note = 2'-fluoroadenosine-3'-phosphate
  modified_base 9: mod_base = OTHER; note = 2'-fluoroadenosine-3'-phosphate
  modified_base 10: mod_base = OTHER; note = 2'-fluorouridine-3'-phosphate
  modified_base 11: mod_base = OTHER; note = 2'-fluorouridine-3'-phosphate
  modified_base 21: mod_base = OTHER; note = L96
  source 1..21: mol_type = other RNA
aataaaacattcctgtgaaat

SEQ ID NO: 601 - RNA, 23 nt, synthetic construct
  misc_feature 1..23: note = Synthetic
  modified_base 1: mod_base = OTHER; note = 2'-O-methyladenosine-3'- phosphorothioate
  modified_base 2: mod_base = OTHER; note = 2'-fluorouridine-3'-phosphorothioate
  modified_base 6: mod_base = OTHER; note = 2'-fluoroadenosine-3'-phosphate
  modified_base 14: mod_base = OTHER; note = 2'-fluoroguanosine-3'-phosphate
  modified_base 16: mod_base = OTHER; note = 2'-fluorouridine-3'-phosphate
  modified_base 21: mod_base = OTHER; note = 2'-O-methyluridine-3'-phosphorothioate
  modified_base 22: mod_base = OTHER; note = 2'-O-methylguanosine-3'- phosphorothioate
  source 1..23: mol_type = other RNA
atttcacaggaatgttttattgt

SEQ ID NO: 602 - RNA, 23 nt, synthetic construct
  misc_feature 1..23: note = Synthetic
  source 1..23: mol_type = other RNA
acaataaaacattcctgtgaaag

SEQ ID NO: 603 - RNA, 21 nt, synthetic construct
  misc_feature 1..21: note = Synthetic
  modified_base 1: mod_base = OTHER; note = 2'-O-methyladenosine-3'- phosphorothioate
  modified_base 2: mod_base = OTHER; note = 2'-O-methyluridine-3'-phosphorothioate
  modified_base 7: mod_base = OTHER; note = 2'-fluorocytidine-3'-phosphate
  modified_base 9: mod_base = OTHER; note = 2'-fluorouridine-3'-phosphate
  modified_base 10: mod_base = OTHER; note = 2'-fluorouridine-3'-phosphate
  modified_base 11: mod_base = OTHER; note = 2'-fluorocytidine-3'-phosphate
  modified_base 21: mod_base = OTHER; note = L96
  source 1..21: mol_type = other RNA
ataaaacattcctgtgaaagt

SEQ ID NO: 604 - RNA, 23 nt, synthetic construct
  misc_feature 1..23: note = Synthetic
  modified_base 1: mod_base = OTHER; note = 2'-O-methyladenosine-3'- phosphorothioate
  modified_base 2: mod_base = OTHER; note = 2'-fluorocytidine-3'-phosphorothioate
  modified_base 6: mod_base = OTHER; note = 2'-fluorocytidine-3'-phosphate
  modified_base 14: mod_base = OTHER; note = 2'-fluorouridine-3'-phosphate
  modified_base 16: mod_base = OTHER; note = 2'-fluorouridine-3'-phosphate
  modified_base 21: mod_base = OTHER; note = 2'-O-methyluridine-3'-phosphorothioate
  modified_base 22: mod_base = OTHER; note = 2'-O-methyluridine-3'- phosphorothioate
  source 1..23: mol_type = other RNA
actttcacaggaatgttttattg

SEQ ID NO: 605 - RNA, 23 nt, synthetic construct
  misc_feature 1..23: note = Synthetic
  source 1..23: mol_type = other RNA
caataaaacattcctgtgaaagg

SEQ ID NO: 606 - RNA, 21 nt, synthetic construct
  misc_feature 1..21: note = Synthetic
  modified_base 1: mod_base = OTHER; note = 2'-O-methyluridine-3'- phosphorothioate
  modified_base 2: mod_base = OTHER; note = 2'-O-methyladenosine-3'-phosphorothioate
  modified_base 7: mod_base = OTHER; note = 2'-fluoroadenosine-3'-phosphate
  modified_base 9: mod_base = OTHER; note = 2'-fluorouridine-3'-phosphate
  modified_base 10: mod_base = OTHER; note = 2'-fluorocytidine-3'-phosphate
  modified_base 11: mod_base = OTHER; note = 2'-fluorocytidine-3'-phosphate
  modified_base 21: mod_base = OTHER; note = L96
  source 1..21: mol_type = other RNA
taaaacattcctgtgaaaggt

SEQ ID NO: 607 - RNA, 23 nt, synthetic construct
  misc_feature 1..23: note = Synthetic
  modified_base 1: mod_base = OTHER; note = 2'-O-methyladenosine-3'- phosphorothioate
  modified_base 2: mod_base = OTHER; note = 2'-fluorocytidine-3'-phosphorothioate
  modified_base 6: mod_base = OTHER; note = 2'-fluorouridine-3'-phosphate
  modified_base 14: mod_base = OTHER; note = 2'-fluoroadenosine-3'-phosphate
  modified_base 16: mod_base = OTHER; note = 2'-fluoroguanosine-3'-phosphate
  modified_base 21: mod_base = OTHER; note = 2'-O-methyladenosine-3'-phosphorothioate
  modified_base 22: mod_base = OTHER; note = 2'-O-methyluridine-3'- phosphorothioate
  source 1..23: mol_type = other RNA
acctttcacaggaatgttttatt

SEQ ID NO: 608 - RNA, 23 nt, synthetic construct
  misc_feature 1..23: note = Synthetic
  source 1..23: mol_type = other RNA
aataaaacattcctgtgaaaggc

SEQ ID NO: 609 - RNA, 21 nt, synthetic construct
  misc_feature 1..21: note = Synthetic
  modified_base 1: mod_base = OTHER; note = 2'-O-methyladenosine-3'- phosphorothioate
  modified_base 2: mod_base = OTHER; note = 2'-O-methyladenosine-3'-phosphorothioate
  modified_base 7: mod_base = OTHER; note = 2'-fluorouridine-3'-phosphate
  modified_base 9: mod_base = OTHER; note = 2'-fluorocytidine-3'-phosphate
  modified_base 10: mod_base = OTHER; note = 2'-fluorocytidine-3'-phosphate
  modified_base 11: mod_base = OTHER; note = 2'-fluorouridine-3'-phosphate
  modified_base 21: mod_base = OTHER; note = L96
  source 1..21: mol_type = other RNA
aaaacattcctgtgaaaggca

SEQ ID NO: 610 - RNA, 23 nt, synthetic construct
  misc_feature 1..23: note = Synthetic
  modified_base 1: mod_base = OTHER; note = 2'-O-methyluridine-3'-phosphorothioate
  modified_base 2: mod_base = OTHER; note = 2'-fluoroguanosine-3'-phosphorothioate
  modified_base 6: mod_base = OTHER; note = 2'-fluorouridine-3'-phosphate
  modified_base 14: mod_base = OTHER; note = 2'-fluoroadenosine-3'-phosphate
  modified_base 16: mod_base = OTHER; note = 2'-fluorouridine-3'-phosphate
  modified_base 21: mod_base = OTHER; note = 2'-O-methyluridine-3'-phosphorothioate
  modified_base 22: mod_base = OTHER; note = 2'-O-methyladenosine-3'-phosphorothioate
  source 1..23: mol_type = other RNA
tgcctttcacaggaatgttttat

SEQ ID NO: 611 - RNA, 23 nt, synthetic construct
  misc_feature 1..23: note = Synthetic
  source 1..23: mol_type = other RNA
ataaaacattcctgtgaaaggca

SEQ ID NO: 612 - RNA, 21 nt, synthetic construct
  misc_feature 1..21: note = Synthetic
  modified_base 1: mod_base = OTHER; note = 2'-O-methyladenosine-3'- phosphorothioate
  modified_base 2: mod_base = OTHER; note = 2'-O-methyladenosine-3'-phosphorothioate
  modified_base 7: mod_base = OTHER; note = 2'-fluorouridine-3'-phosphate
  modified_base 9: mod_base = OTHER; note = 2'-fluorocytidine-3'-phosphate
  modified_base 10: mod_base = OTHER; note = 2'-fluorouridine-3'-phosphate
  modified_base 11: mod_base = OTHER; note = 2'-fluoroguanosine-3'-phosphate
  modified_base 21: mod_base = OTHER; note = L96
  source 1..21: mol_type = other RNA
aaacattcctgtgaaaggcat

SEQ ID NO: 613 - RNA, 23 nt, synthetic construct
  misc_feature 1..23: note = Synthetic
  modified_base 1: mod_base = OTHER; note = 2'-O-methyladenosine-3'- phosphorothioate
  modified_base 2: mod_base = OTHER; note = 2'-fluorouridine-3'-phosphorothioate
  modified_base 6: mod_base = OTHER; note = 2'-fluorouridine-3'-phosphate
  modified_base 14: mod_base = OTHER; note = 2'-fluoroguanosine-3'-phosphate
  modified_base 16: mod_base = OTHER; note = 2'-fluoroadenosine-3'-phosphate
  modified_base 21: mod_base = OTHER; note = 2'-O-methyluridine-3'-phosphorothioate
  modified_base 22: mod_base = OTHER; note = 2'-O-methyluridine-3'- phosphorothioate
  source 1..23: mol_type = other RNA
atgcctttcacaggaatgtttta

SEQ ID NO: 614 - RNA, 23 nt, synthetic construct
  misc_feature 1..23: note = Synthetic
  source 1..23: mol_type = other RNA
taaaacattcctgtgaaaggcac

SEQ ID NO: 615 - RNA, 21 nt, synthetic construct
  misc_feature 1..21: note = Synthetic
  modified_base 1: mod_base = OTHER; note = 2'-O-methyladenosine-3'- phosphorothioate
  modified_base 2: mod_base = OTHER; note = 2'-O-methyladenosine-3'-phosphorothioate
  modified_base 7: mod_base = OTHER; note = 2'-fluorocytidine-3'-phosphate
  modified_base 9: mod_base = OTHER; note = 2'-fluorouridine-3'-phosphate
  modified_base 10: mod_base = OTHER; note = 2'-fluoroguanosine-3'-phosphate
  modified_base 11: mod_base = OTHER; note = 2'-fluorouridine-3'-phosphate
  modified_base 21: mod_base = OTHER; note = L96
  source 1..21: mol_type = other RNA
aacattcctgtgaaaggcact

SEQ ID NO: 616 - RNA, 23 nt, synthetic construct
  misc_feature 1..23: note = Synthetic
  modified_base 1: mod_base = OTHER; note = 2'-O-methyladenosine-3'- phosphorothioate
  modified_base 2: mod_base = OTHER; note = 2'-fluoroguanosine-3'-phosphorothioate
  modified_base 6: mod_base = OTHER; note = 2'-fluorocytidine-3'-phosphate
  modified_base 14: mod_base = OTHER; note = 2'-fluoroguanosine-3'-phosphate
  modified_base 16: mod_base = OTHER; note = 2'-fluoroadenosine-3'-phosphate
  modified_base 21: mod_base = OTHER; note = 2'-O-methyluridine-3'-phosphorothioate
  modified_base 22: mod_base = OTHER; note = 2'-O-methyluridine-3'- phosphorothioate
  source 1..23: mol_type = other RNA
agtgcctttcacaggaatgtttt

SEQ ID NO: 617 - RNA, 23 nt, synthetic construct
  misc_feature 1..23: note = Synthetic
  source 1..23: mol_type = other RNA
aaaacattcctgtgaaaggcact

SEQ ID NO: 618 - RNA, 21 nt, synthetic construct
  misc_feature 1..21: note = Synthetic
  modified_base 1: mod_base = OTHER; note = 2'-O-methyladenosine-3'- phosphorothioate
  modified_base 2: mod_base = OTHER; note = 2'-O-methylcytidine-3'-phosphorothioate
  modified_base 7: mod_base = OTHER; note = 2'-fluorocytidine-3'-phosphate
  modified_base 9: mod_base = OTHER; note = 2'-fluoroguanosine-3'-phosphate
  modified_base 10: mod_base = OTHER; note = 2'-fluorouridine-3'-phosphate
  modified_base 11: mod_base = OTHER; note = 2'-fluoroguanosine-3'-phosphate
  modified_base 21: mod_base = OTHER; note = L96
  source 1..21: mol_type = other RNA
acattcctgtgaaaggcactt

SEQ ID NO: 619 - RNA, 23 nt, synthetic construct
  misc_feature 1..23: note = Synthetic
  modified_base 1: mod_base = OTHER; note = 2'-O-methyladenosine-3'- phosphorothioate
  modified_base 2: mod_base = OTHER; note = 2'-fluoroadenosine-3'-phosphorothioate
  modified_base 6: mod_base = OTHER; note = 2'-fluorocytidine-3'-phosphate
  modified_base 14: mod_base = OTHER; note = 2'-fluoroadenosine-3'-phosphate
  modified_base 16: mod_base = OTHER; note = 2'-fluoroguanosine-3'-phosphate
  modified_base 21: mod_base = OTHER; note = 2'-O-methyluridine-3'- phosphorothioate
  modified_base 22: mod_base = OTHER; note = 2'-O-methyluridine-3'- phosphorothioate
  source 1..23: mol_type = other RNA
aagtgcctttcacaggaatgttt

SEQ ID NO: 620 - RNA, 23 nt, synthetic construct
  misc_feature 1..23: note = Synthetic
  source 1..23: mol_type = other RNA
aaacattcctgtgaaaggcactt

SEQ ID NO: 621 - RNA, 21 nt, synthetic construct
  misc_feature 1..21: note = Synthetic
  modified_base 1: mod_base = OTHER; note = 2'-O-methylcytidine-3'- phosphorothioate
  modified_base 2: mod_base = OTHER; note = 2'-O-methyladenosine-3'-phosphorothioate
  modified_base 7: mod_base = OTHER; note = 2'-fluorouridine-3'-phosphate
  modified_base 9: mod_base = OTHER; note = 2'-fluorouridine-3'-phosphate
  modified_base 10: mod_base = OTHER; note = 2'-fluoroguanosine-3'-phosphate
  modified_base 11: mod_base = OTHER; note = 2'-fluoroadenosine-3'-phosphate
  modified_base 21: mod_base = OTHER; note = L96
  source 1..21: mol_type = other RNA
cattcctgtgaaaggcacttt

SEQ ID NO: 622 - RNA, 23 nt, synthetic construct
  misc_feature 1..23: note = Synthetic
  modified_base 1: mod_base = OTHER; note = 2'-O-methyladenosine-3'- phosphorothioate
  modified_base 2: mod_base = OTHER; note = 2'-fluoroadenosine-3'-phosphorothioate
  modified_base 6: mod_base = OTHER; note = 2'-fluoroguanosine-3'-phosphate
  modified_base 14: mod_base = OTHER; note = 2'-fluorocytidine-3'-phosphate
  modified_base 16: mod_base = OTHER; note = 2'-fluoroguanosine-3'-phosphate
  modified_base 21: mod_base = OTHER; note = 2'-O-methylguanosine-3'- phosphorothioate
  modified_base 22: mod_base = OTHER; note = 2'-O-methyluridine-3'- phosphorothioate
  source 1..23: mol_type = other RNA
aaagtgcctttcacaggaatgtt

SEQ ID NO: 623 - RNA, 23 nt, synthetic construct
  misc_feature 1..23: note = Synthetic
  source 1..23: mol_type = other RNA
aacattcctgtgaaaggcacttt

SEQ ID NO: 624 - RNA, 21 nt, synthetic construct
  misc_feature 1..21: note = Synthetic
  modified_base 1: mod_base = OTHER; note = 2'-O-methyladenosine-3'- phosphorothioate
  modified_base 2: mod_base = OTHER; note = 2'-O-methyluridine-3'-phosphorothioate
  modified_base 7: mod_base = OTHER; note = 2'-fluoroguanosine-3'-phosphate
  modified_base 9: mod_base = OTHER; note = 2'-fluoroguanosine-3'-phosphate
  modified_base 10: mod_base = OTHER; note = 2'-fluoroadenosine-3'-phosphate
  modified_base 11: mod_base = OTHER; note = 2'-fluoroadenosine-3'-phosphate
  modified_base 21: mod_base = OTHER; note = L96
  source 1..21: mol_type = other RNA
attcctgtgaaaggcactttt

SEQ ID NO: 625 - RNA, 23 nt, synthetic construct
  misc_feature 1..23: note = Synthetic
  modified_base 1: mod_base = OTHER; note = 2'-O-methyladenosine-3'- phosphorothioate
  modified_base 2: mod_base = OTHER; note = 2'-fluoroadenosine-3'-phosphorothioate
  modified_base 6: mod_base = OTHER; note = 2'-fluorouridine-3'-phosphate
  modified_base 14: mod_base = OTHER; note = 2'-fluoroadenosine-3'-phosphate
  modified_base 16: mod_base = OTHER; note = 2'-fluoroadenosine-3'-phosphate
  modified_base 21: mod_base = OTHER; note = 2'-O-methyluridine-3'- phosphorothioate
  modified_base 22: mod_base = OTHER; note = 2'-O-methylguanosine-3'- phosphorothioate
  source 1..23: mol_type = other RNA
aaaagtgcctttcacaggaatgt

SEQ ID NO: 626 - RNA, 23 nt, synthetic construct
  misc_feature 1..23: note = Synthetic
  source 1..23: mol_type = other RNA
acattcctgtgaaaggcactttt

SEQ ID NO: 627 - RNA, 21 nt, synthetic construct
  misc_feature 1..21: note = Synthetic
  modified_base 1: mod_base = OTHER; note = 2'-O-methyluridine-3'- phosphorothioate
  modified_base 2: mod_base = OTHER; note = 2'-O-methyluridine-3'-phosphorothioate
  modified_base 7: mod_base = OTHER; note = 2'-fluorouridine-3'-phosphate
  modified_base 9: mod_base = OTHER; note = 2'-fluoroadenosine-3'-phosphate
  modified_base 10: mod_base = OTHER; note = 2'-fluoroadenosine-3'-phosphate
  modified_base 11: mod_base = OTHER; note = 2'-fluoroadenosine-3'-phosphate
  modified_base 21: mod_base = OTHER; note = L96
  source 1..21: mol_type = other RNA
ttcctgtgaaaggcacttttt

SEQ ID NO: 628 - RNA, 23 nt, synthetic construct
  misc_feature 1..23: note = Synthetic
  modified_base 1: mod_base = OTHER; note = 2'-O-methyladenosine-3'- phosphorothioate
  modified_base 2: mod_base = OTHER; note = 2'-fluoroadenosine-3'-phosphorothioate
  modified_base 6: mod_base = OTHER; note = 2'-fluoroguanosine-3'-phosphate
  modified_base 14: mod_base = OTHER; note = 2'-fluorocytidine-3'-phosphate
  modified_base 16: mod_base = OTHER; note = 2'-fluorocytidine-3'-phosphate
  modified_base 21: mod_base = OTHER; note = 2'-O-methyladenosine-3'- phosphorothioate
  modified_base 22: mod_base = OTHER; note = 2'-O-methyluridine-3'- phosphorothioate
  source 1..23: mol_type = other RNA
aaaaagtgcctttcacaggaatg

SEQ ID NO: 629 - RNA, 23 nt, synthetic construct
  misc_feature 1..23: note = Synthetic
  source 1..23: mol_type = other RNA
cattcctgtgaaaggcacttttc

SEQ ID NO: 630 - RNA, 21 nt, synthetic construct
  misc_feature 1..21: note = Synthetic
  modified_base 1: mod_base = OTHER; note = 2'-O-methyluridine-3'- phosphorothioate
  modified_base 2: mod_base = OTHER; note = 2'-O-methylcytidine-3'-phosphorothioate
  modified_base 7: mod_base = OTHER; note = 2'-fluoroguanosine-3'-phosphate
  modified_base 9: mod_base = OTHER; note = 2'-fluoroadenosine-3'-phosphate
  modified_base 10: mod_base = OTHER; note = 2'-fluoroadenosine-3'-phosphate
  modified_base 11: mod_base = OTHER; note = 2'-fluoroguanosine-3'-phosphate
  modified_base 21: mod_base = OTHER; note = L96
  source 1..21: mol_type = other RNA
tcctgtgaaaggcacttttca

SEQ ID NO: 631 - RNA, 23 nt, synthetic construct
  misc_feature 1..23: note = Synthetic
  modified_base 1: mod_base = OTHER; note = 2'-O-methyluridine-3'-phosphorothioate
  modified_base 2: mod_base = OTHER; note = 2'-fluoroguanosine-3'-phosphorothioate
  modified_base 6: mod_base = OTHER; note = 2'-fluoroadenosine-3'-phosphate
  modified_base 14: mod_base = OTHER; note = 2'-fluorouridine-3'-phosphate
  modified_base 16: mod_base = OTHER; note = 2'-fluoroadenosine-3'-phosphate
  modified_base 21: mod_base = OTHER; note = 2'-O-methyladenosine-3'-phosphorothioate
  modified_base 22: mod_base = OTHER; note = 2'-O-methyladenosine-3'-phosphorothioate
  source 1..23: mol_type = other RNA
tgaaaagtgcctttcacaggaat

SEQ ID NO: 632 - RNA, 23 nt, synthetic construct
  misc_feature 1..23: note = Synthetic
  source 1..23: mol_type = other RNA
attcctgtgaaaggcacttttca

SEQ ID NO: 633 - RNA, 21 nt, synthetic construct
  misc_feature 1..21: note = Synthetic
  modified_base 1: mod_base = OTHER; note = 2'-O-methylcytidine-3'-phosphorothioate
  modified_base 2: mod_base = OTHER; note = 2'-O-methylcytidine-3'-phosphorothioate
  modified_base 9: mod_base = OTHER; note = 2'-fluoroadenosine-3'-phosphate
  modified_base 10: mod_base = OTHER; note = 2'-fluorouridine-3'-phosphate
  modified_base 11: mod_base = OTHER; note = 2'-fluorouridine-3'-phosphate
  modified_base 21: mod_base = OTHER; note = L96
  source 1..21: mol_type = other RNA
cctgtgaaaggcacttttcat

SEQ ID NO: 634 - RNA, 23 nt, synthetic construct
  misc_feature 1..23: note = Synthetic
  modified_base 1: mod_base = OTHER; note = 2'-O-methyladenosine-3'- phosphorothioate
  modified_base 2: mod_base = OTHER; note = 2'-fluorouridine-3'-phosphorothioate
  modified_base 6: mod_base = OTHER; note = 2'-fluoroadenosine-3'-phosphate
  modified_base 14: mod_base = OTHER; note = 2'-fluorouridine-3'-phosphate
  modified_base 16: mod_base = OTHER; note = 2'-fluorocytidine-3'-phosphate
  modified_base 21: mod_base = OTHER; note 2'-O-methylguanosinemethyladenosine-3'-phosphorothioate
  modified_base 22: mod_base = OTHER; note = 2'-O-methylguanosine-3'- phosphorothioate
  source 1..23: mol_type = other RNA
atgaaaagtgcctttcacaggaa

SEQ ID NO: 635 - RNA, 23 nt, synthetic construct
  misc_feature 1..23: note = Synthetic
  source 1..23: mol_type = other RNA
ttcctgtgaaaggcacttttcat

SEQ ID NO: 636 - RNA, 21 nt, synthetic construct
  misc_feature 1..21: note = Synthetic
  modified_base 1: mod_base = OTHER; note = 2'-O-methylcytidine-3'- phosphorothioate
  modified_base 2: mod_base = OTHER; note = 2'-O-methyluridine-3'-phosphorothioate
  modified_base 7: mod_base = OTHER; note = 2'-fluoroadenosine-3'-phosphate
  modified_base 9: mod_base = OTHER; note = 2'-fluoroguanosine-3'-phosphate
  modified_base 10: mod_base = OTHER; note = 2'-fluoroguanosine-3'-phosphate
  modified_base 11: mod_base = OTHER; note = 2'-fluorocytidine-3'-phosphate
  modified_base 21: mod_base = OTHER; note = L96
  source 1..21: mol_type = other RNA
ctgtgaaaggcacttttcatt

SEQ ID NO: 637 - RNA, 23 nt, synthetic construct
  misc_feature 1..23: note = Synthetic
  modified_base 1: mod_base = OTHER; note = 2'-O-methyladenosine-3'- phosphorothioate
  modified_base 2: mod_base = OTHER; note = 2'-fluoroadenosine-3'-phosphorothioate
  modified_base 6: mod_base = OTHER; note = 2'-fluoroadenosine-3'-phosphate
  modified_base 14: mod_base = OTHER; note = 2'-fluorouridine-3'-phosphate
  modified_base 16: mod_base = OTHER; note = 2'-fluorouridine-3'-phosphate
  modified_base 21: mod_base = OTHER; note = 2'-O-methylguanosine-3'- phosphorothioate
  modified_base 22: mod_base = OTHER; note = 2'-O-methylguanosine-3'- phosphorothioate
  source 1..23: mol_type = other RNA
aatgaaaagtgcctttcacagga

SEQ ID NO: 638 - RNA, 23 nt, synthetic construct
  misc_feature 1..23: note = Synthetic
  source 1..23: mol_type = other RNA
tcctgtgaaaggcacttttcatt

SEQ ID NO: 639 - RNA, 21 nt, synthetic construct
  misc_feature 1..21: note = Synthetic
  modified_base 1: mod_base = OTHER; note = 2'-O-methyluridine-3'-phosphorothioate
  modified_base 2: mod_base = OTHER; note = 2'-O-methylguanosine-3'-phosphorothioate
  modified_base 7: mod_base = OTHER; note = 2'-fluoroadenosine-3'-phosphate
  modified_base 9: mod_base = OTHER; note = 2'-fluoroguanosine-3'-phosphate
  modified_base 10: mod_base = OTHER; note = 2'-fluorocytidine-3'-phosphate
  modified_base 11: mod_base = OTHER; note = 2'-fluoroadenosine-3'-phosphate
  modified_base 21: mod_base = OTHER; note = L96
  source 1..21: mol_type = other RNA
tgtgaaaggcacttttcattt

SEQ ID NO: 640 - RNA, 23 nt, synthetic construct
  misc_feature 1..23: note = Synthetic
  modified_base 1: mod_base = OTHER; note = 2'-O-methyladenosine-3'- phosphorothioate
  modified_base 2: mod_base = OTHER; note = 2'-fluoroadenosine-3'-phosphorothioate
  modified_base 6: mod_base = OTHER; note = 2'-fluoroadenosine-3'-phosphate
  modified_base 14: mod_base = OTHER; note = 2'-fluorocytidine-3'-phosphate
  modified_base 16: mod_base = OTHER; note = 2'-fluorouridine-3'-phosphate
  modified_base 21: mod_base = OTHER; note = 2'-O-methyladenosine-3'- phosphorothioate
  modified_base 22: mod_base = OTHER; note = 2'-O-methylguanosine-3'- phosphorothioate
  source 1..23: mol_type = other RNA
aaatgaaaagtgcctttcacagg

SEQ ID NO: 641 - RNA, 23 nt, synthetic construct
  misc_feature 1..23: note = Synthetic
  source 1..23: mol_type = other RNA
cctgtgaaaggcacttttcattc

SEQ ID NO: 642 - RNA, 21 nt, synthetic construct
  misc_feature 1..21: note = Synthetic
  modified_base 1: mod_base = OTHER; note = 2'-O-methyluridine-3'-phosphorothioate
  modified_base 2: mod_base = OTHER; note = 2'-O-methylguanosine-3'-phosphorothioate
  modified_base 7: mod_base = OTHER; note = 2'-fluoroguanosine-3'-phosphate
  modified_base 9: mod_base = OTHER; note = 2'-fluoroadenosine-3'-phosphate
  modified_base 10: mod_base = OTHER; note = 2'-fluorocytidine-3'-phosphate
  modified_base 11: mod_base = OTHER; note = 2'-fluorouridine-3'-phosphate
  modified_base 21: mod_base = OTHER; note = L96
  source 1..21: mol_type = other RNA
tgaaaggcacttttcattcca

SEQ ID NO: 643 - RNA, 23 nt, synthetic construct
  misc_feature 1..23: note = Synthetic
  modified_base 1: mod_base = OTHER; note = 2'-O-methyluridine-3'-phosphorothioate
  modified_base 2: mod_base = OTHER; note = 2'-fluoroguanosine-3'-phosphorothioate
  modified_base 6: mod_base = OTHER; note = 2'-fluorouridine-3'-phosphate
  modified_base 14: mod_base = OTHER; note = 2'-fluoroguanosine-3'-phosphate
  modified_base 16: mod_base = OTHER; note = 2'-fluorocytidine-3'-phosphate
  modified_base 21: mod_base = OTHER; note = 2'-O-methyladenosine-3'-phosphorothioate
  modified_base 22: mod_base = OTHER; note = 2'-O-methylcytidine-3'-phosphorothioate
  source 1..23: mol_type = other RNA
tggaatgaaaagtgcctttcaca

SEQ ID NO: 644 - RNA, 23 nt, synthetic construct
  misc_feature 1..23: note = Synthetic
  source 1..23: mol_type = other RNA
tgtgaaaggcacttttcattcca

SEQ ID NO: 645 - RNA, 21 nt, synthetic construct
  misc_feature 1..21: note = Synthetic
  modified_base 1: mod_base = OTHER; note = 2'-O-methylguanosine-3'- phosphorothioate
  modified_base 2: mod_base = OTHER; note = 2'-O-methyladenosine-3'-phosphorothioate
  modified_base 7: mod_base = OTHER; note = 2'-fluorocytidine-3'-phosphate
  modified_base 9: mod_base = OTHER; note = 2'-fluorocytidine-3'-phosphate
  modified_base 10: mod_base = OTHER; note = 2'-fluorouridine-3'-phosphate
  modified_base 11: mod_base = OTHER; note = 2'-fluorouridine-3'-phosphate
  modified_base 21: mod_base = OTHER; note = L96
  source 1..21: mol_type = other RNA
gaaaggcacttttcattccat

SEQ ID NO: 646 - RNA, 23 nt, synthetic construct
  misc_feature 1..23: note = Synthetic
  modified_base 1: mod_base = OTHER; note = 2'-O-methyladenosine-3'-phosphorothioate
  modified_base 2: mod_base = OTHER; note = 2'-fluorouridine -3'-phosphorothioate
  modified_base 6: mod_base = OTHER; note = 2'-fluoroadenosine-3'-phosphate
  modified_base 14: mod_base = OTHER; note = 2'-fluorouridine-3'-phosphate
  modified_base 16: mod_base = OTHER; note = 2'-fluorocytidine-3'-phosphate
  modified_base 21: mod_base = OTHER; note = 2'-O-methylcytidine-3'- phosphorothioate
  modified_base 22: mod_base = OTHER; note = 2'-O-methyladenosine-3'- phosphorothioate
  source 1..23: mol_type = other RNA
atggaatgaaaagtgcctttcac

SEQ ID NO: 647 - RNA, 23 nt, synthetic construct
  misc_feature 1..23: note = Synthetic
  source 1..23: mol_type = other RNA
gtgaaaggcacttttcattccac

SEQ ID NO: 648 - RNA, 21 nt, synthetic construct
  misc_feature 1..21: note = Synthetic
  modified_base 1: mod_base = OTHER; note = 2'-O-methylcytidine-3'- phosphorothioate
  modified_base 2: mod_base = OTHER; note = 2'-O-methyluridine-3'-phosphorothioate
  modified_base 7: mod_base = OTHER; note = 2'-fluoroguanosine-3'-phosphate
  modified_base 9: mod_base = OTHER; note = 2'-fluorocytidine-3'-phosphate
  modified_base 10: mod_base = OTHER; note = 2'-fluoroguanosine-3'-phosphate
  modified_base 11: mod_base = OTHER; note = 2'-fluoroadenosine-3'-phosphate
  modified_base 21: mod_base = OTHER; note = L96
  source 1..21: mol_type = other RNA
ctgaaggacgagggatgggat

SEQ ID NO: 649 - RNA, 23 nt, synthetic construct
  modified_base 7: mod_base = OTHER; note = thymine
  misc_feature 1..23: note = Synthetic
  modified_base 1: mod_base = OTHER; note = 2'-O-methyladenosine-3'-phosphorothioate
  modified_base 2: mod_base = OTHER; note = 2'-fluorouridine -3'-phosphorothioate
  modified_base 6: mod_base = OTHER; note = 2'-fluoroadenosine-3'-phosphate
  modified_base 7: mod_base = OTHER; note = Thymidine-glycol nucleic acid
  modified_base 14: mod_base = OTHER; note = 2'-fluorouridine-3'-phosphate
  modified_base 16: mod_base = OTHER; note = 2'-fluorocytidine-3'-phosphate
  modified_base 21: mod_base = OTHER; note = 2'-O-methylguanosine-3'- phosphorothioate
  modified_base 22: mod_base = OTHER; note = 2'-O-methylguanosine-3'- phosphorothioate
  source 1..23: mol_type = other RNA
atcccatccctcgtccttcaggt

SEQ ID NO: 650 - RNA, 23 nt, synthetic construct
  misc_feature 1..23: note = Synthetic
  source 1..23: mol_type = other RNA
acctgaaggacgagggatgggat

SEQ ID NO: 651 - RNA, 21 nt, synthetic construct
  misc_feature 1..21: note = Synthetic
  modified_base 1: mod_base = OTHER; note = 2'-O-methyluridine-3'-phosphorothioate
  modified_base 2: mod_base = OTHER; note = 2'-O-methylguanosine-3'-phosphorothioate
  modified_base 7: mod_base = OTHER; note = 2'-fluoroadenosine-3'-phosphate
  modified_base 9: mod_base = OTHER; note = 2'-fluoroguanosine-3'-phosphate
  modified_base 10: mod_base = OTHER; note = 2'-fluoroadenosine-3'-phosphate
  modified_base 11: mod_base = OTHER; note = 2'-fluoroguanosine-3'-phosphate
  modified_base 21: mod_base = OTHER; note = L96
  source 1..21: mol_type = other RNA
tgaaggacgagggatgggatt

SEQ ID NO: 652 - RNA, 23 nt, synthetic construct
  misc_feature 1..23: note = Synthetic
  modified_base 1: mod_base = OTHER; note = 2'-O-methyladenosine-3'- phosphorothioate
  modified_base 2: mod_base = OTHER; note = 2'-fluoroadenosine-3'-phosphorothioate
  modified_base 6: mod_base = OTHER; note = 2'-fluorocytidine-3'-phosphate
  modified_base 7: mod_base = OTHER; note = Adenosine-glycol nucleic acid
  modified_base 14: mod_base = OTHER; note = 2'-fluoroguanosine-3'-phosphate
  modified_base 16: mod_base = OTHER; note = 2'-fluorocytidine-3'-phosphate
  modified_base 21: mod_base = OTHER; note = 2'-O-methyladenosine-3'- phosphorothioate
  modified_base 22: mod_base = OTHER; note = 2'-O-methylguanosine-3'- phosphorothioate
  source 1..23: mol_type = other RNA
aatcccatccctcgtccttcagg

SEQ ID NO: 653 - RNA, 23 nt, synthetic construct
  misc_feature 1..23: note = Synthetic
  source 1..23: mol_type = other RNA
cctgaaggacgagggatgggatt

SEQ ID NO: 654 - RNA, 21 nt, synthetic construct
  misc_feature 1..21: note = Synthetic
  modified_base 1: mod_base = OTHER; note = 2'-O-methylguanosine-3'- phosphorothioate
  modified_base 2: mod_base = OTHER; note = 2'-O-methyladenosine-3'-phosphorothioate
  modified_base 7: mod_base = OTHER; note = 2'-fluorocytidine-3'-phosphate
  modified_base 9: mod_base = OTHER; note = 2'-fluoroadenosine-3'-phosphate
  modified_base 10: mod_base = OTHER; note = 2'-fluoroguanosine-3'-phosphate
  modified_base 11: mod_base = OTHER; note = 2'-fluoroguanosine-3'-phosphate
  modified_base 21: mod_base = OTHER; note = L96
  source 1..21: mol_type = other RNA
gaaggacgagggatgggattt

SEQ ID NO: 655 - RNA, 23 nt, synthetic construct
  misc_feature 1..23: note = Synthetic
  modified_base 1: mod_base = OTHER; note = 2'-O-methyladenosine-3'- phosphorothioate
  modified_base 2: mod_base = OTHER; note = 2'-fluoroadenosine-3'-phosphorothioate
  modified_base 6: mod_base = OTHER; note = 2'-fluorocytidine-3'-phosphate
  modified_base 7: mod_base = OTHER; note = Cytidine-glycol nucleic acid
  modified_base 14: mod_base = OTHER; note = 2'-fluorocytidine-3'-phosphate
  modified_base 16: mod_base = OTHER; note = 2'-fluorouridine-3'-phosphate
  modified_base 21: mod_base = OTHER; note = 2'-O-methylcytidine-3'- phosphorothioate
  modified_base 22: mod_base = OTHER; note = 2'-O-methyladenosine-3'- phosphorothioate
  source 1..23: mol_type = other RNA
aaatcccatccctcgtccttcag

SEQ ID NO: 656 - RNA, 23 nt, synthetic construct
  misc_feature 1..23: note = Synthetic
  source 1..23: mol_type = other RNA
ctgaaggacgagggatgggattt

SEQ ID NO: 657 - RNA, 21 nt, synthetic construct
  misc_feature 1..21: note = Synthetic
  modified_base 1: mod_base = OTHER; note = 2'-O-methyladenosine-3'- phosphorothioate
  modified_base 2: mod_base = OTHER; note = 2'-O-methyladenosine-3'-phosphorothioate
  modified_base 7: mod_base = OTHER; note = 2'-fluoroguanosine-3'-phosphate
  modified_base 9: mod_base = OTHER; note = 2'-fluoroguanosine-3'-phosphate
  modified_base 10: mod_base = OTHER; note = 2'-fluoroguanosine-3'-phosphate
  modified_base 11: mod_base = OTHER; note = 2'-fluoroguanosine-3'-phosphate
  modified_base 21: mod_base = OTHER; note = L96
  source 1..21: mol_type = other RNA
aaggacgagggatgggatttt

SEQ ID NO: 658 - RNA, 23 nt, synthetic construct
  misc_feature 1..23: note = Synthetic
  modified_base 1: mod_base = OTHER; note = 2'-O-methyladenosine-3'- phosphorothioate
  modified_base 2: mod_base = OTHER; note = 2'-fluoroadenosine-3'-phosphorothioate
  modified_base 6: mod_base = OTHER; note = 2'-fluorocytidine-3'-phosphate
  modified_base 7: mod_base = OTHER; note = Cytidine-glycol nucleic acid
  modified_base 14: mod_base = OTHER; note = 2'-fluorouridine-3'-phosphate
  modified_base 16: mod_base = OTHER; note = 2'-fluoroguanosine-3'-phosphate
  modified_base 21: mod_base = OTHER; note = 2'-O-methyluridine-3'- phosphorothioate
  modified_base 22: mod_base = OTHER; note = 2'-O-methylcytidine-3'- phosphorothioate
  source 1..23: mol_type = other RNA
aaaatcccatccctcgtccttca

SEQ ID NO: 659 - RNA, 23 nt, synthetic construct
  misc_feature 1..23: note = Synthetic
  source 1..23: mol_type = other RNA
tgaaggacgagggatgggatttc

SEQ ID NO: 660 - RNA, 21 nt, synthetic construct
  misc_feature 1..21: note = Synthetic
  modified_base 1: mod_base = OTHER; note = 2'-O-methyladenosine-3'- phosphorothioate
  modified_base 2: mod_base = OTHER; note = 2'-O-methylguanosine-3'-phosphorothioate
  modified_base 7: mod_base = OTHER; note = 2'-fluoroadenosine-3'-phosphate
  modified_base 9: mod_base = OTHER; note = 2'-fluoroguanosine-3'-phosphate
  modified_base 10: mod_base = OTHER; note = 2'-fluoroguanosine-3'-phosphate
  modified_base 11: mod_base = OTHER; note = 2'-fluoroadenosine-3'-phosphate
  modified_base 21: mod_base = OTHER; note = L96
  source 1..21: mol_type = other RNA
aggacgagggatgggatttca

SEQ ID NO: 661 - RNA, 23 nt, synthetic construct
  misc_feature 1..23: note = Synthetic
  modified_base 1: mod_base = OTHER; note = 2'-O-methyluridine-3'- phosphorothioate
  modified_base 2: mod_base = OTHER; note = 2'-fluoroguanosine-3'-phosphorothioate
  modified_base 6: mod_base = OTHER; note = 2'-fluorouridine-3'-phosphate
  modified_base 7: mod_base = OTHER; note = Cytidine-glycol nucleic acid
  modified_base 14: mod_base = OTHER; note = 2'-fluorocytidine-3'-phosphate
  modified_base 16: mod_base = OTHER; note = 2'-fluorocytidine-3'-phosphate
  modified_base 21: mod_base = OTHER; note = 2'-O-methyluridine-3'- phosphorothioate
  modified_base 22: mod_base = OTHER; note = 2'-O-methyluridine-3'- phosphorothioate
  source 1..23: mol_type = other RNA
tgaaatcccatccctcgtccttc

SEQ ID NO: 662 - RNA, 23 nt, synthetic construct
  misc_feature 1..23: note = Synthetic
  source 1..23: mol_type = other RNA
gaaggacgagggatgggatttca

SEQ ID NO: 663 - RNA, 21 nt, synthetic construct
  misc_feature 1..21: note = Synthetic
  modified_base 1: mod_base = OTHER; note = 2'-O-methylguanosine-3'- phosphorothioate
  modified_base 2: mod_base = OTHER; note = 2'-O-methylguanosine-3'-phosphorothioate
  modified_base 7: mod_base = OTHER; note = 2'-fluoroguanosine-3'-phosphate
  modified_base 9: mod_base = OTHER; note = 2'-fluoroguanosine-3'-phosphate
  modified_base 10: mod_base = OTHER; note = 2'-fluoroadenosine-3'-phosphate
  modified_base 11: mod_base = OTHER; note = 2'-fluorouridine-3'-phosphate
  modified_base 21: mod_base = OTHER; note = L96
  source 1..21: mol_type = other RNA
ggacgagggatgggatttcat

SEQ ID NO: 664 - RNA, 23 nt, synthetic construct
  modified_base 7: mod_base = OTHER; note = thymine
  misc_feature 1..23: note = Synthetic
  modified_base 1: mod_base = OTHER; note = 2'-O-methyladenosine-3'-phosphorothioate
  modified_base 2: mod_base = OTHER; note = 2'-fluorouridine -3'-phosphorothioate
  modified_base 6: mod_base = OTHER; note = 2'-fluoroadenosine-3'-phosphate
  modified_base 7: mod_base = OTHER; note = Thymidine-glycol nucleic acid
  modified_base 14: mod_base = OTHER; note = 2'-fluorocytidine-3'-phosphate
  modified_base 16: mod_base = OTHER; note = 2'-fluorouridine-3'-phosphate
  modified_base 21: mod_base = OTHER; note = 2'-O-methylcytidine-3'- phosphorothioate
  modified_base 22: mod_base = OTHER; note = 2'-O-methyluridine-3'- phosphorothioate
  source 1..23: mol_type = other RNA
atgaaatcccatccctcgtcctt

SEQ ID NO: 665 - RNA, 23 nt, synthetic construct
  misc_feature 1..23: note = Synthetic
  source 1..23: mol_type = other RNA
aaggacgagggatgggatttcat

SEQ ID NO: 666 - RNA, 21 nt, synthetic construct
  misc_feature 1..21: note = Synthetic
  modified_base 1: mod_base = OTHER; note = 2'-O-methylguanosine-3'- phosphorothioate
  modified_base 2: mod_base = OTHER; note = 2'-O-methyladenosine-3'-phosphorothioate
  modified_base 7: mod_base = OTHER; note = 2'-fluoroguanosine-3'-phosphate
  modified_base 9: mod_base = OTHER; note = 2'-fluoroadenosine-3'-phosphate
  modified_base 10: mod_base = OTHER; note = 2'-fluorouridine-3'-phosphate
  modified_base 11: mod_base = OTHER; note = 2'-fluoroguanosine-3'-phosphate
  modified_base 21: mod_base = OTHER; note = L96
  source 1..21: mol_type = other RNA
gacgagggatgggatttcatt

SEQ ID NO: 667 - RNA, 23 nt, synthetic construct
  misc_feature 1..23: note = Synthetic
  modified_base 1: mod_base = OTHER; note = 2'-O-methyladenosine-3'- phosphorothioate
  modified_base 2: mod_base = OTHER; note = 2'-fluoroadenosine-3'-phosphorothioate
  modified_base 6: mod_base = OTHER; note = 2'-fluoroadenosine-3'-phosphate
  modified_base 7: mod_base = OTHER; note = Adenosine-glycol nucleic acid
  modified_base 14: mod_base = OTHER; note = 2'-fluorocytidine-3'-phosphate
  modified_base 16: mod_base = OTHER; note = 2'-fluorocytidine-3'-phosphate
  modified_base 21: mod_base = OTHER; note = 2'-O-methylcytidine-3'- phosphorothioate
  modified_base 22: mod_base = OTHER; note = 2'-O-methylcytidine-3'- phosphorothioate
  source 1..23: mol_type = other RNA
aatgaaatcccatccctcgtcct

SEQ ID NO: 668 - RNA, 23 nt, synthetic construct
  misc_feature 1..23: note = Synthetic
  source 1..23: mol_type = other RNA
aggacgagggatgggatttcatg

SEQ ID NO: 669 - RNA, 21 nt, synthetic construct
  misc_feature 1..21: note = Synthetic
  modified_base 1: mod_base = OTHER; note = 2'-O-methyladenosine-3'- phosphorothioate
  modified_base 2: mod_base = OTHER; note = 2'-O-methylcytidine-3'-phosphorothioate
  modified_base 7: mod_base = OTHER; note = 2'-fluoroguanosine-3'-phosphate
  modified_base 9: mod_base = OTHER; note = 2'-fluorouridine-3'-phosphate
  modified_base 10: mod_base = OTHER; note = 2'-fluoroguanosine-3'-phosphate
  modified_base 11: mod_base = OTHER; note = 2'-fluoroguanosine-3'-phosphate
  modified_base 21: mod_base = OTHER; note = L96
  source 1..21: mol_type = other RNA
acgagggatgggatttcatgt

SEQ ID NO: 670 - RNA, 23 nt, synthetic construct
  misc_feature 1..23: note = Synthetic
  modified_base 1: mod_base = OTHER; note = 2'-O-methyladenosine-3'- phosphorothioate
  modified_base 2: mod_base = OTHER; note = 2'-fluorocytidine-3'-phosphorothioate
  modified_base 6: mod_base = OTHER; note = 2'-fluoroadenosine-3'-phosphate
  modified_base 7: mod_base = OTHER; note = Adenosine-glycol nucleic acid
  modified_base 14: mod_base = OTHER; note = 2'-fluorouridine-3'-phosphate
  modified_base 16: mod_base = OTHER; note = 2'-fluorocytidine-3'-phosphate
  modified_base 21: mod_base = OTHER; note = 2'-O-methyluridine-3'- phosphorothioate
  modified_base 22: mod_base = OTHER; note = 2'-O-methylcytidine-3'- phosphorothioate
  source 1..23: mol_type = other RNA
acatgaaatcccatccctcgtcc

SEQ ID NO: 671 - RNA, 23 nt, synthetic construct
  misc_feature 1..23: note = Synthetic
  source 1..23: mol_type = other RNA
ggacgagggatgggatttcatgt

SEQ ID NO: 672 - RNA, 21 nt, synthetic construct
  misc_feature 1..21: note = Synthetic
  modified_base 1: mod_base = OTHER; note = 2'-O-methylcytidine-3'- phosphorothioate
  modified_base 2: mod_base = OTHER; note = 2'-O-methylguanosine-3'-phosphorothioate
  modified_base 7: mod_base = OTHER; note = 2'-fluoroadenosine-3'-phosphate
  modified_base 9: mod_base = OTHER; note = 2'-fluoroguanosine-3'-phosphate
  modified_base 10: mod_base = OTHER; note = 2'-fluoroguanosine-3'-phosphate
  modified_base 11: mod_base = OTHER; note = 2'-fluoroguanosine-3'-phosphate
  modified_base 21: mod_base = OTHER; note = L96
  source 1..21: mol_type = other RNA
cgagggatgggatttcatgta

SEQ ID NO: 673 - RNA, 23 nt, synthetic construct
  misc_feature 1..23: note = Synthetic
  modified_base 1: mod_base = OTHER; note = 2'-O-methyluridine-3'- phosphorothioate
  modified_base 2: mod_base = OTHER; note = 2'-fluoroadenosine-3'-phosphorothioate
  modified_base 6: mod_base = OTHER; note = 2'-fluoroguanosine-3'-phosphate
  modified_base 7: mod_base = OTHER; note = Adenosine-glycol nucleic acid
  modified_base 14: mod_base = OTHER; note = 2'-fluoroadenosine-3'-phosphate
  modified_base 16: mod_base = OTHER; note = 2'-fluorocytidine-3'-phosphate
  modified_base 21: mod_base = OTHER; note = 2'-O-methylguanosine-3'- phosphorothioate
  modified_base 22: mod_base = OTHER; note = 2'-O-methyluridine-3'- phosphorothioate
  source 1..23: mol_type = other RNA
tacatgaaatcccatccctcgtc

SEQ ID NO: 674 - RNA, 23 nt, synthetic construct
  misc_feature 1..23: note = Synthetic
  source 1..23: mol_type = other RNA
gacgagggatgggatttcatgta

SEQ ID NO: 675 - RNA, 21 nt, synthetic construct
  misc_feature 1..21: note = Synthetic
  modified_base 1: mod_base = OTHER; note = 2'-O-methylguanosine-3'- phosphorothioate
  modified_base 2: mod_base = OTHER; note = 2'-O-methyladenosine-3'-phosphorothioate
  modified_base 7: mod_base = OTHER; note = 2'-fluorouridine-3'-phosphate
  modified_base 9: mod_base = OTHER; note = 2'-fluoroguanosine-3'-phosphate
  modified_base 10: mod_base = OTHER; note = 2'-fluoroguanosine-3'-phosphate
  modified_base 11: mod_base = OTHER; note = 2'-fluoroadenosine-3'-phosphate
  modified_base 21: mod_base = OTHER; note = L96
  source 1..21: mol_type = other RNA
gagggatgggatttcatgtaa

SEQ ID NO: 676 - RNA, 23 nt, synthetic construct
  modified_base 6: mod_base = OTHER; note = thymine
  misc_feature 1..23: note = Synthetic
  modified_base 1: mod_base = OTHER; note = 2'-O-methyluridine-3'- phosphorothioate
  modified_base 2: mod_base = OTHER; note = 2'-fluorouridine-3'-phosphorothioate
  modified_base 6: mod_base = OTHER; note = Thymidine-glycol nucleic acid
  modified_base 14: mod_base = OTHER; note = 2'-fluorocytidine-3'-phosphate
  modified_base 16: mod_base = OTHER; note = 2'-fluorouridine-3'-phosphate
  modified_base 21: mod_base = OTHER; note = 2'-O-methylcytidine-3'-phosphorothioate
  modified_base 22: mod_base = OTHER; note = 2'-O-methylguanosine-3'- phosphorothioate
  source 1..23: mol_type = other RNA
ttacatgaaatcccatccctcgt

SEQ ID NO: 677 - RNA, 23 nt, synthetic construct
  misc_feature 1..23: note = Synthetic
  source 1..23: mol_type = other RNA
acgagggatgggatttcatgtaa

SEQ ID NO: 678 - RNA, 21 nt, synthetic construct
  misc_feature 1..21: note = Synthetic
  modified_base 1: mod_base = OTHER; note = 2'-O-methyladenosine-3'- phosphorothioate
  modified_base 2: mod_base = OTHER; note = 2'-O-methylguanosine-3'-phosphorothioate
  modified_base 7: mod_base = OTHER; note = 2'-fluoroguanosine-3'-phosphate
  modified_base 9: mod_base = OTHER; note = 2'-fluoroguanosine-3'-phosphate
  modified_base 10: mod_base = OTHER; note = 2'-fluoroadenosine-3'-phosphate
  modified_base 11: mod_base = OTHER; note = 2'-fluorouridine-3'-phosphate
  modified_base 21: mod_base = OTHER; note = L96
  source 1..21: mol_type = other RNA
agggatgggatttcatgtaat

SEQ ID NO: 679 - RNA, 23 nt, synthetic construct
  modified_base 7: mod_base = OTHER; note = thymine
  misc_feature 1..23: note = Synthetic
  modified_base 1: mod_base = OTHER; note = 2'-O-methyladenosine-3'-phosphorothioate
  modified_base 2: mod_base = OTHER; note = 2'-fluorouridine -3'-phosphorothioate
  modified_base 6: mod_base = OTHER; note = 2'-fluoroadenosine-3'-phosphate
  modified_base 7: mod_base = OTHER; note = Thymidine-glycol nucleic acid
  modified_base 14: mod_base = OTHER; note = 2'-fluorocytidine-3'-phosphate
  modified_base 16: mod_base = OTHER; note = 2'-fluoroadenosine-3'-phosphate
  modified_base 21: mod_base = OTHER; note = 2'-O-methyluridine-3'- phosphorothioate
  modified_base 22: mod_base = OTHER; note = 2'-O-methylcytidine-3'- phosphorothioate
  source 1..23: mol_type = other RNA
attacatgaaatcccatccctcg

SEQ ID NO: 680 - RNA, 23 nt, synthetic construct
  misc_feature 1..23: note = Synthetic
  source 1..23: mol_type = other RNA
cgagggatgggatttcatgtaac

SEQ ID NO: 681 - RNA, 21 nt, synthetic construct
  misc_feature 1..21: note = Synthetic
  modified_base 1: mod_base = OTHER; note = 2'-O-methylguanosine-3'- phosphorothioate
  modified_base 2: mod_base = OTHER; note = 2'-O-methylguanosine-3'-phosphorothioate
  modified_base 7: mod_base = OTHER; note = 2'-fluoroguanosine-3'-phosphate
  modified_base 9: mod_base = OTHER; note = 2'-fluoroadenosine-3'-phosphate
  modified_base 10: mod_base = OTHER; note = 2'-fluorouridine-3'-phosphate
  modified_base 11: mod_base = OTHER; note = 2'-fluorouridine-3'-phosphate
  modified_base 21: mod_base = OTHER; note = L96
  source 1..21: mol_type = other RNA
gggatgggatttcatgtaact

SEQ ID NO: 682 - RNA, 23 nt, synthetic construct
  misc_feature 1..23: note = Synthetic
  modified_base 1: mod_base = OTHER; note = 2'-O-methyladenosine-3'- phosphorothioate
  modified_base 2: mod_base = OTHER; note = 2'-fluoroguanosine-3'-phosphorothioate
  modified_base 6: mod_base = OTHER; note = 2'-fluorocytidine-3'-phosphate
  modified_base 7: mod_base = OTHER; note = Adenosine-glycol nucleic acid
  modified_base 14: mod_base = OTHER; note = 2'-fluorocytidine-3'-phosphate
  modified_base 16: mod_base = OTHER; note = 2'-fluorocytidine-3'-phosphate
  modified_base 21: mod_base = OTHER; note = 2'-O-methylcytidine-3'- phosphorothioate
  modified_base 22: mod_base = OTHER; note = 2'-O-methyluridine-3'- phosphorothioate
  source 1..23: mol_type = other RNA
agttacatgaaatcccatccctc

SEQ ID NO: 683 - RNA, 23 nt, synthetic construct
  misc_feature 1..23: note = Synthetic
  source 1..23: mol_type = other RNA
gagggatgggatttcatgtaacc

SEQ ID NO: 684 - RNA, 21 nt, synthetic construct
  misc_feature 1..21: note = Synthetic
  modified_base 1: mod_base = OTHER; note = 2'-O-methylguanosine-3'- phosphorothioate
  modified_base 2: mod_base = OTHER; note = 2'-O-methylguanosine-3'-phosphorothioate
  modified_base 7: mod_base = OTHER; note = 2'-fluoroguanosine-3'-phosphate
  modified_base 9: mod_base = OTHER; note = 2'-fluorouridine-3'-phosphate
  modified_base 10: mod_base = OTHER; note = 2'-fluorouridine-3'-phosphate
  modified_base 11: mod_base = OTHER; note = 2'-fluorouridine-3'-phosphate
  modified_base 21: mod_base = OTHER; note = L96
  source 1..21: mol_type = other RNA
ggatgggatttcatgtaacca

SEQ ID NO: 685 - RNA, 23 nt, synthetic construct
  misc_feature 1..23: note = Synthetic
  modified_base 1: mod_base = OTHER; note = 2'-O-methyluridine-3'- phosphorothioate
  modified_base 2: mod_base = OTHER; note = 2'-fluoroguanosine-3'-phosphorothioate
  modified_base 6: mod_base = OTHER; note = 2'-fluoroadenosine-3'-phosphate
  modified_base 7: mod_base = OTHER; note = Cytidine-glycol nucleic acid
  modified_base 14: mod_base = OTHER; note = 2'-fluorouridine-3'-phosphate
  modified_base 16: mod_base = OTHER; note = 2'-fluorocytidine-3'-phosphate
  modified_base 21: mod_base = OTHER; note = 2'-O-methylcytidine-3'- phosphorothioate
  modified_base 22: mod_base = OTHER; note = 2'-O-methylcytidine-3'- phosphorothioate
  source 1..23: mol_type = other RNA
tggttacatgaaatcccatccct

SEQ ID NO: 686 - RNA, 23 nt, synthetic construct
  misc_feature 1..23: note = Synthetic
  source 1..23: mol_type = other RNA
agggatgggatttcatgtaacca

SEQ ID NO: 687 - RNA, 21 nt, synthetic construct
  misc_feature 1..21: note = Synthetic
  modified_base 1: mod_base = OTHER; note = 2'-O-methylguanosine-3'- phosphorothioate
  modified_base 2: mod_base = OTHER; note = 2'-O-methyladenosine-3'-phosphorothioate
  modified_base 7: mod_base = OTHER; note = 2'-fluoroadenosine-3'-phosphate
  modified_base 9: mod_base = OTHER; note = 2'-fluorouridine-3'-phosphate
  modified_base 10: mod_base = OTHER; note = 2'-fluorouridine-3'-phosphate
  modified_base 11: mod_base = OTHER; note = 2'-fluorocytidine-3'-phosphate
  modified_base 21: mod_base = OTHER; note = L96
  source 1..21: mol_type = other RNA
gatgggatttcatgtaaccaa

SEQ ID NO: 688 - RNA, 23 nt, synthetic construct
  misc_feature 1..23: note = Synthetic
  modified_base 1: mod_base = OTHER; note = 2'-O-methyluridine-3'- phosphorothioate
  modified_base 2: mod_base = OTHER; note = 2'-fluorouridine-3'-phosphorothioate
  modified_base 6: mod_base = OTHER; note = 2'-fluorouridine-3'-phosphate
  modified_base 7: mod_base = OTHER; note = Adenosine-glycol nucleic acid
  modified_base 14: mod_base = OTHER; note = 2'-fluoroadenosine-3'-phosphate
  modified_base 16: mod_base = OTHER; note = 2'-fluorocytidine-3'-phosphate
  modified_base 21: mod_base = OTHER; note = 2'-O-methylcytidine-3'- phosphorothioate
  modified_base 22: mod_base = OTHER; note = 2'-O-methylcytidine-3'- phosphorothioate
  source 1..23: mol_type = other RNA
ttggttacatgaaatcccatccc

SEQ ID NO: 689 - RNA, 23 nt, synthetic construct
  misc_feature 1..23: note = Synthetic
  source 1..23: mol_type = other RNA
gggatgggatttcatgtaaccaa

SEQ ID NO: 690 - RNA, 21 nt, synthetic construct
  misc_feature 1..21: note = Synthetic
  modified_base 1: mod_base = OTHER; note = 2'-O-methyladenosine-3'- phosphorothioate
  modified_base 2: mod_base = OTHER; note = 2'-O-methyluridine-3'-phosphorothioate
  modified_base 7: mod_base = OTHER; note = 2'-fluorouridine-3'-phosphate
  modified_base 9: mod_base = OTHER; note = 2'-fluorouridine-3'-phosphate
  modified_base 10: mod_base = OTHER; note = 2'-fluorocytidine-3'-phosphate
  modified_base 11: mod_base = OTHER; note = 2'-fluoroadenosine-3'-phosphate
  modified_base 21: mod_base = OTHER; note = L96
  source 1..21: mol_type = other RNA
atgggatttcatgtaaccaat

SEQ ID NO: 691 - RNA, 23 nt, synthetic construct
  modified_base 7: mod_base = OTHER; note = thymine
  misc_feature 1..23: note = Synthetic
  modified_base 1: mod_base = OTHER; note = 2'-O-methyladenosine-3'-phosphorothioate
  modified_base 2: mod_base = OTHER; note = 2'-fluorouridine -3'-phosphorothioate
  modified_base 6: mod_base = OTHER; note = 2'-fluorouridine-3'-phosphate
  modified_base 7: mod_base = OTHER; note = Thymidine-glycol nucleic acid
  modified_base 14: mod_base = OTHER; note = 2'-fluoroadenosine-3'-phosphate
  modified_base 16: mod_base = OTHER; note = 2'-fluorouridine-3'-phosphate
  modified_base 21: mod_base = OTHER; note = 2'-O-methyluridine-3'- phosphorothioate
  modified_base 22: mod_base = OTHER; note = 2'-O-methylcytidine-3'- phosphorothioate
  source 1..23: mol_type = other RNA
attggttacatgaaatcccatcc

SEQ ID NO: 692 - RNA, 23 nt, synthetic construct
  misc_feature 1..23: note = Synthetic
  source 1..23: mol_type = other RNA
ggatgggatttcatgtaaccaag

SEQ ID NO: 693 - RNA, 21 nt, synthetic construct
  misc_feature 1..21: note = Synthetic
  modified_base 1: mod_base = OTHER; note = 2'-O-methyluridine-3'-phosphorothioate
  modified_base 2: mod_base = OTHER; note = 2'-O-methylguanosine-3'-phosphorothioate
  modified_base 7: mod_base = OTHER; note = 2'-fluorouridine-3'-phosphate
  modified_base 9: mod_base = OTHER; note = 2'-fluorocytidine-3'-phosphate
  modified_base 10: mod_base = OTHER; note = 2'-fluoroadenosine-3'-phosphate
  modified_base 11: mod_base = OTHER; note = 2'-fluorouridine-3'-phosphate
  modified_base 21: mod_base = OTHER; note = L96
  source 1..21: mol_type = other RNA
tgggatttcatgtaaccaaga

SEQ ID NO: 694 - RNA, 23 nt, synthetic construct
  modified_base 7: mod_base = OTHER; note = thymine
  misc_feature 1..23: note = Synthetic
  modified_base 1: mod_base = OTHER; note = 2'-O-methyluridine-3'-phosphorothioate
  modified_base 2: mod_base = OTHER; note = 2'-fluorocytidine -3'-phosphorothioate
  modified_base 6: mod_base = OTHER; note = 2'-fluoroguanosine-3'-phosphate
  modified_base 7: mod_base = OTHER; note = Thymidine-glycol nucleic acid
  modified_base 14: mod_base = OTHER; note = 2'-fluoroadenosine-3'-phosphate
  modified_base 16: mod_base = OTHER; note = 2'-fluoroadenosine-3'-phosphate
  modified_base 21: mod_base = OTHER; note = 2'-O-methyladenosine-3'- phosphorothioate
  modified_base 22: mod_base = OTHER; note = 2'-O-methyluridine-3'- phosphorothioate
  source 1..23: mol_type = other RNA
tcttggttacatgaaatcccatc

SEQ ID NO: 695 - RNA, 23 nt, synthetic construct
  misc_feature 1..23: note = Synthetic
  source 1..23: mol_type = other RNA
gatgggatttcatgtaaccaaga

SEQ ID NO: 696 - RNA, 21 nt, synthetic construct
  misc_feature 1..21: note = Synthetic
  modified_base 1: mod_base = OTHER; note = 2'-O-methylguanosine-3'- phosphorothioate
  modified_base 2: mod_base = OTHER; note = 2'-O-methylguanosine-3'-phosphorothioate
  modified_base 7: mod_base = OTHER; note = 2'-fluorouridine-3'-phosphate
  modified_base 9: mod_base = OTHER; note = 2'-fluoroadenosine-3'-phosphate
  modified_base 10: mod_base = OTHER; note = 2'-fluorouridine-3'-phosphate
  modified_base 11: mod_base = OTHER; note = 2'-fluoroguanosine-3'-phosphate
  modified_base 21: mod_base = OTHER; note = L96
  source 1..21: mol_type = other RNA
gggatttcatgtaaccaagat

SEQ ID NO: 697 - RNA, 23 nt, synthetic construct
  modified_base 8: mod_base = OTHER; note = thymine
  misc_feature 1..23: note = Synthetic
  modified_base 1: mod_base = OTHER; note = 2'-O-methyladenosine-3'-phosphorothioate
  modified_base 2: mod_base = OTHER; note = 2'-fluorouridine -3'-phosphorothioate
  modified_base 6: mod_base = OTHER; note = 2'-fluoroguanosine-3'-phosphate
  modified_base 8: mod_base = OTHER; note = Thymidine-glycol nucleic acid
  modified_base 14: mod_base = OTHER; note = 2'-fluoroguanosine-3'-phosphate
  modified_base 16: mod_base = OTHER; note = 2'-fluoroadenosine-3'-phosphate
  modified_base 21: mod_base = OTHER; note = 2'-O-methylcytidine-3'- phosphorothioate
  modified_base 22: mod_base = OTHER; note = 2'-O-methyladenosine-3'- phosphorothioate
  source 1..23: mol_type = other RNA
atcttggttacatgaaatcccat

SEQ ID NO: 698 - RNA, 23 nt, synthetic construct
  misc_feature 1..23: note = Synthetic
  source 1..23: mol_type = other RNA
atgggatttcatgtaaccaagag

SEQ ID NO: 699 - RNA, 21 nt, synthetic construct
  misc_feature 1..21: note = Synthetic
  modified_base 1: mod_base = OTHER; note = 2'-O-methylguanosine-3'- phosphorothioate
  modified_base 2: mod_base = OTHER; note = 2'-O-methylguanosine-3'-phosphorothioate
  modified_base 7: mod_base = OTHER; note = 2'-fluorocytdine-3'-phosphate
  modified_base 9: mod_base = OTHER; note = 2'-fluorouridine-3'-phosphate
  modified_base 10: mod_base = OTHER; note = 2'-fluoroguanosine-3'-phosphate
  modified_base 11: mod_base = OTHER; note = 2'-fluorouridine-3'-phosphate
  modified_base 21: mod_base = OTHER; note = L96
  source 1..21: mol_type = other RNA
ggatttcatgtaaccaagagt

SEQ ID NO: 700 - RNA, 23 nt, synthetic construct
  modified_base 6: mod_base = OTHER; note = thymine
  misc_feature 1..23: note = Synthetic
  modified_base 1: mod_base = OTHER; note = 2'-O-methyladenosine-3'- phosphorothioate
  modified_base 2: mod_base = OTHER; note = 2'-fluorocytidine-3'-phosphorothioate
  modified_base 6: mod_base = OTHER; note = Thymidine-glycol nucleic acid
  modified_base 14: mod_base = OTHER; note = 2'-fluorouridine-3'-phosphate
  modified_base 16: mod_base = OTHER; note = 2'-fluoroadenosine-3'-phosphate
  modified_base 21: mod_base = OTHER; note = 2'-O-methylcytidine-3'-phosphorothioate
  modified_base 22: mod_base = OTHER; note = 2'-O-methylcytidine-3'- phosphorothioate
  source 1..23: mol_type = other RNA
actcttggttacatgaaatccca

SEQ ID NO: 701 - RNA, 23 nt, synthetic construct
  misc_feature 1..23: note = Synthetic
  source 1..23: mol_type = other RNA
tgggatttcatgtaaccaagagt

SEQ ID NO: 702 - RNA, 21 nt, synthetic construct
  misc_feature 1..21: note = Synthetic
  modified_base 1: mod_base = OTHER; note = 2'-O-methylguanosine-3'- phosphorothioate
  modified_base 2: mod_base = OTHER; note = 2'-O-methyladenosine-3'-phosphorothioate
  modified_base 7: mod_base = OTHER; note = 2'-fluoroadenosine-3'-phosphate
  modified_base 9: mod_base = OTHER; note = 2'-fluoroguanosine-3'-phosphate
  modified_base 10: mod_base = OTHER; note = 2'-fluorouridine-3'-phosphate
  modified_base 11: mod_base = OTHER; note = 2'-fluoroadenosine-3'-phosphate
  modified_base 21: mod_base = OTHER; note = L96
  source 1..21: mol_type = other RNA
gatttcatgtaaccaagagta

SEQ ID NO: 703 - RNA, 23 nt, synthetic construct
  modified_base 7: mod_base = OTHER; note = thymine
  misc_feature 1..23: note = Synthetic
  modified_base 1: mod_base = OTHER; note = 2'-O-methyluridine-3'-phosphorothioate
  modified_base 2: mod_base = OTHER; note = 2'-fluoroadenosine -3'-phosphorothioate
  modified_base 6: mod_base = OTHER; note = 2'-fluorouridine-3'-phosphate
  modified_base 7: mod_base = OTHER; note = Thymidine-glycol nucleic acid
  modified_base 14: mod_base = OTHER; note = 2'-fluoroadenosine-3'-phosphate
  modified_base 16: mod_base = OTHER; note = 2'-fluoroguanosine-3'-phosphate
  modified_base 21: mod_base = OTHER; note = 2'-O-methylcytidine-3'- phosphorothioate
  modified_base 22: mod_base = OTHER; note = 2'-O-methylcytidine-3'- phosphorothioate
  source 1..23: mol_type = other RNA
tactcttggttacatgaaatccc

SEQ ID NO: 704 - RNA, 23 nt, synthetic construct
  misc_feature 1..23: note = Synthetic
  source 1..23: mol_type = other RNA
gggatttcatgtaaccaagagta

SEQ ID NO: 705 - RNA, 21 nt, synthetic construct
  misc_feature 1..21: note = Synthetic
  modified_base 1: mod_base = OTHER; note = 2'-O-methyladenosine-3'- phosphorothioate
  modified_base 2: mod_base = OTHER; note = 2'-O-methyluridine-3'-phosphorothioate
  modified_base 7: mod_base = OTHER; note = 2'-fluorouridine-3'-phosphate
  modified_base 9: mod_base = OTHER; note = 2'-fluorouridine-3'-phosphate
  modified_base 10: mod_base = OTHER; note = 2'-fluoroadenosine-3'-phosphate
  modified_base 11: mod_base = OTHER; note = 2'-fluoroadenosine-3'-phosphate
  modified_base 21: mod_base = OTHER; note = L96
  source 1..21: mol_type = other RNA
atttcatgtaaccaagagtat

SEQ ID NO: 706 - RNA, 23 nt, synthetic construct
  modified_base 7: mod_base = OTHER; note = thymine
  misc_feature 1..23: note = Synthetic
  modified_base 1: mod_base = OTHER; note = 2'-O-methyladenosine-3'-phosphorothioate
  modified_base 2: mod_base = OTHER; note = 2'-fluorouridine -3'-phosphorothioate
  modified_base 6: mod_base = OTHER; note = 2'-fluorocytidine-3'-phosphate
  modified_base 7: mod_base = OTHER; note = Thymidine-glycol nucleic acid
  modified_base 14: mod_base = OTHER; note = 2'-fluorocytidine-3'-phosphate
  modified_base 16: mod_base = OTHER; note = 2'-fluorouridine-3'-phosphate
  modified_base 21: mod_base = OTHER; note = 2'-O-methyluridine-3'- phosphorothioate
  modified_base 22: mod_base = OTHER; note = 2'-O-methylcytidine-3'- phosphorothioate
  source 1..23: mol_type = other RNA
atactcttggttacatgaaatcc

SEQ ID NO: 707 - RNA, 23 nt, synthetic construct
  misc_feature 1..23: note = Synthetic
  source 1..23: mol_type = other RNA
ggatttcatgtaaccaagagtat

SEQ ID NO: 708 - RNA, 21 nt, synthetic construct
  misc_feature 1..21: note = Synthetic
  modified_base 1: mod_base = OTHER; note = 2'-O-methyluridine-3'- phosphorothioate
  modified_base 2: mod_base = OTHER; note = 2'-O-methyluridine-3'-phosphorothioate
  modified_base 7: mod_base = OTHER; note = 2'-fluoroguanosine-3'-phosphate
  modified_base 9: mod_base = OTHER; note = 2'-fluoroadenosine-3'-phosphate
  modified_base 10: mod_base = OTHER; note = 2'-fluoroadenosine-3'-phosphate
  modified_base 11: mod_base = OTHER; note = 2'-fluorocytidine-3'-phosphate
  modified_base 21: mod_base = OTHER; note = L96
  source 1..21: mol_type = other RNA
tttcatgtaaccaagagtatt

SEQ ID NO: 709 - RNA, 23 nt, synthetic construct
  misc_feature 1..23: note = Synthetic
  modified_base 1: mod_base = OTHER; note = 2'-O-methyladenosine-3'- phosphorothioate
  modified_base 2: mod_base = OTHER; note = 2'-fluoroadenosine-3'-phosphorothioate
  modified_base 6: mod_base = OTHER; note = 2'-fluorouridine-3'-phosphate
  modified_base 7: mod_base = OTHER; note = Cytidine-glycol nucleic acid
  modified_base 14: mod_base = OTHER; note = 2'-fluoroadenosine-3'-phosphate
  modified_base 16: mod_base = OTHER; note = 2'-fluoroadenosine-3'-phosphate
  modified_base 21: mod_base = OTHER; note = 2'-O-methyladenosine-3'- phosphorothioate
  modified_base 22: mod_base = OTHER; note = 2'-O-methyluridine-3'- phosphorothioate
  source 1..23: mol_type = other RNA
aatactcttggttacatgaaatc

SEQ ID NO: 710 - RNA, 23 nt, synthetic construct
  misc_feature 1..23: note = Synthetic
  source 1..23: mol_type = other RNA
gatttcatgtaaccaagagtatt

SEQ ID NO: 711 - RNA, 21 nt, synthetic construct
  misc_feature 1..21: note = Synthetic
  modified_base 1: mod_base = OTHER; note = 2'-O-methyluridine-3'- phosphorothioate
  modified_base 2: mod_base = OTHER; note = 2'-O-methyluridine-3'-phosphorothioate
  modified_base 7: mod_base = OTHER; note = 2'-fluorouridine-3'-phosphate
  modified_base 9: mod_base = OTHER; note = 2'-fluoroadenosine-3'-phosphate
  modified_base 10: mod_base = OTHER; note = 2'-fluorocytidine-3'-phosphate
  modified_base 11: mod_base = OTHER; note = 2'-fluorocytidine-3'-phosphate
  modified_base 21: mod_base = OTHER; note = L96
  source 1..21: mol_type = other RNA
ttcatgtaaccaagagtattt

SEQ ID NO: 712 - RNA, 23 nt, synthetic construct
  modified_base 7: mod_base = OTHER; note = thymine
  misc_feature 1..23: note = Synthetic
  modified_base 1: mod_base = OTHER; note = 2'-O-methyladenosine-3'- phosphorothioate
  modified_base 2: mod_base = OTHER; note = 2'-fluoroadenosine-3'-phosphorothioate
  modified_base 6: mod_base = OTHER; note = 2'-fluorocytidine-3'-phosphate
  modified_base 7: mod_base = OTHER; note = Thymidine-glycol nucleic acid
  modified_base 14: mod_base = OTHER; note = 2'-fluorouridine-3'-phosphate
  modified_base 16: mod_base = OTHER; note = 2'-fluorocytidine-3'-phosphate
  modified_base 21: mod_base = OTHER; note = 2'-O-methyladenosine-3'- phosphorothioate
  modified_base 22: mod_base = OTHER; note = 2'-O-methyladenosine-3'- phosphorothioate
  source 1..23: mol_type = other RNA
aaatactcttggttacatgaaat

SEQ ID NO: 713 - RNA, 23 nt, synthetic construct
  misc_feature 1..23: note = Synthetic
  source 1..23: mol_type = other RNA
atttcatgtaaccaagagtattc

SEQ ID NO: 714 - RNA, 21 nt, synthetic construct
  misc_feature 1..21: note = Synthetic
  modified_base 1: mod_base = OTHER; note = 2'-O-methyluridine-3'- phosphorothioate
  modified_base 2: mod_base = OTHER; note = 2'-O-methylcytidine-3'-phosphorothioate
  modified_base 7: mod_base = OTHER; note = 2'-fluoroadenosine-3'-phosphate
  modified_base 9: mod_base = OTHER; note = 2'-fluorocytidine-3'-phosphate
  modified_base 10: mod_base = OTHER; note = 2'-fluorocytidine-3'-phosphate
  modified_base 11: mod_base = OTHER; note = 2'-fluoroadenosine-3'-phosphate
  modified_base 21: mod_base = OTHER; note = L96
  source 1..21: mol_type = other RNA
tcatgtaaccaagagtattct

SEQ ID NO: 715 - RNA, 23 nt, synthetic construct
  misc_feature 1..23: note = Synthetic
  modified_base 1: mod_base = OTHER; note = 2'-O-methyladenosine-3'- phosphorothioate
  modified_base 2: mod_base = OTHER; note = 2'-fluoroguanosine-3'-phosphorothioate
  modified_base 6: mod_base = OTHER; note = 2'-fluoroadenosine-3'-phosphate
  modified_base 7: mod_base = OTHER; note = Cytidine-glycol nucleic acid
  modified_base 14: mod_base = OTHER; note = 2'-fluorouridine-3'-phosphate
  modified_base 16: mod_base = OTHER; note = 2'-fluoroadenosine-3'-phosphate
  modified_base 21: mod_base = OTHER; note = 2'-O-methyladenosine-3'- phosphorothioate
  modified_base 22: mod_base = OTHER; note = 2'-O-methyladenosine-3'- phosphorothioate
  source 1..23: mol_type = other RNA
agaatactcttggttacatgaaa

SEQ ID NO: 716 - RNA, 23 nt, synthetic construct
  misc_feature 1..23: note = Synthetic
  source 1..23: mol_type = other RNA
tttcatgtaaccaagagtattcc

SEQ ID NO: 717 - RNA, 21 nt, synthetic construct
  misc_feature 1..21: note = Synthetic
  modified_base 1: mod_base = OTHER; note = 2'-O-methylcytidine-3'- phosphorothioate
  modified_base 2: mod_base = OTHER; note = 2'-O-methyladenosine-3'-phosphorothioate
  modified_base 7: mod_base = OTHER; note = 2'-fluoroadenosine-3'-phosphate
  modified_base 9: mod_base = OTHER; note = 2'-fluorocytidine-3'-phosphate
  modified_base 10: mod_base = OTHER; note = 2'-fluoroadenosine-3'-phosphate
  modified_base 11: mod_base = OTHER; note = 2'-fluoroadenosine-3'-phosphate
  modified_base 21: mod_base = OTHER; note = L96
  source 1..21: mol_type = other RNA
catgtaaccaagagtattcca

SEQ ID NO: 718 - RNA, 23 nt, synthetic construct
  misc_feature 1..23: note = Synthetic
  modified_base 1: mod_base = OTHER; note = 2'-O-methyluridine-3'- phosphorothioate
  modified_base 2: mod_base = OTHER; note = 2'-fluoroguanosine-3'-phosphorothioate
  modified_base 6: mod_base = OTHER; note = 2'-fluorouridine-3'-phosphate
  modified_base 7: mod_base = OTHER; note = Adenosine-glycol nucleic acid
  modified_base 14: mod_base = OTHER; note = 2'-fluoroguanosine-3'-phosphate
  modified_base 16: mod_base = OTHER; note = 2'-fluorouridine-3'-phosphate
  modified_base 21: mod_base = OTHER; note = 2'-O-methylguanosine-3'- phosphorothioate
  modified_base 22: mod_base = OTHER; note = 2'-O-methyladenosine-3'- phosphorothioate
  source 1..23: mol_type = other RNA
tggaatactcttggttacatgaa

SEQ ID NO: 719 - RNA, 23 nt, synthetic construct
  misc_feature 1..23: note = Synthetic
  source 1..23: mol_type = other RNA
ttcatgtaaccaagagtattcca

SEQ ID NO: 720 - RNA, 21 nt, synthetic construct
  misc_feature 1..21: note = Synthetic
  modified_base 1: mod_base = OTHER; note = 2'-O-methyladenosine-3'- phosphorothioate
  modified_base 2: mod_base = OTHER; note = 2'-O-methyluridine-3'-phosphorothioate
  modified_base 7: mod_base = OTHER; note = 2'-fluorocytidine-3'-phosphate
  modified_base 9: mod_base = OTHER; note = 2'-fluoroadenosine-3'-phosphate
  modified_base 10: mod_base = OTHER; note = 2'-fluoroadenosine-3'-phosphate
  modified_base 11: mod_base = OTHER; note = 2'-fluoroguanosine-3'-phosphate
  modified_base 21: mod_base = OTHER; note = L96
  source 1..21: mol_type = other RNA
atgtaaccaagagtattccat

SEQ ID NO: 721 - RNA, 23 nt, synthetic construct
  modified_base 7: mod_base = OTHER; note = thymine
  misc_feature 1..23: note = Synthetic
  modified_base 1: mod_base = OTHER; note = 2'-O-methyladenosine-3'-phosphorothioate
  modified_base 2: mod_base = OTHER; note = 2'-fluorouridine -3'-phosphorothioate
  modified_base 6: mod_base = OTHER; note = 2'-fluoroadenosine-3'-phosphate
  modified_base 7: mod_base = OTHER; note = Thymidine-glycol nucleic acid
  modified_base 14: mod_base = OTHER; note = 2'-fluoroguanosine-3'-phosphate
  modified_base 16: mod_base = OTHER; note = 2'-fluorouridine-3'-phosphate
  modified_base 21: mod_base = OTHER; note = 2'-O-methyluridine-3'- phosphorothioate
  modified_base 22: mod_base = OTHER; note = 2'-O-methylguanosine-3'- phosphorothioate
  source 1..23: mol_type = other RNA
atggaatactcttggttacatga

SEQ ID NO: 722 - RNA, 23 nt, synthetic construct
  misc_feature 1..23: note = Synthetic
  source 1..23: mol_type = other RNA
tcatgtaaccaagagtattccat

SEQ ID NO: 723 - RNA, 21 nt, synthetic construct
  misc_feature 1..21: note = Synthetic
  modified_base 1: mod_base = OTHER; note = 2'-O-methyluridine-3'-phosphorothioate
  modified_base 2: mod_base = OTHER; note = 2'-O-methylguanosine-3'-phosphorothioate
  modified_base 7: mod_base = OTHER; note = 2'-fluorocytidine-3'-phosphate
  modified_base 9: mod_base = OTHER; note = 2'-fluoroadenosine-3'-phosphate
  modified_base 10: mod_base = OTHER; note = 2'-fluoroguanine-3'-phosphate
  modified_base 11: mod_base = OTHER; note = 2'-fluoroadenosine-3'-phosphate
  modified_base 21: mod_base = OTHER; note = L96
  source 1..21: mol_type = other RNA
tgtaaccaagagtattccatt

SEQ ID NO: 724 - RNA, 23 nt, synthetic construct
  misc_feature 1..23: note = Synthetic
  modified_base 1: mod_base = OTHER; note = 2'-O-methyladenosine-3'- phosphorothioate
  modified_base 2: mod_base = OTHER; note = 2'-fluoroadenosine-3'-phosphorothioate
  modified_base 6: mod_base = OTHER; note = 2'-fluoroadenosine-3'-phosphate
  modified_base 7: mod_base = OTHER; note = Adenosine-glycol nucleic acid
  modified_base 14: mod_base = OTHER; note = 2'-fluorouridine-3'-phosphate
  modified_base 16: mod_base = OTHER; note = 2'-fluoroguanosine-3'-phosphate
  modified_base 21: mod_base = OTHER; note = 2'-O-methyladenosine-3'- phosphorothioate
  modified_base 22: mod_base = OTHER; note = 2'-O-methyluridine-3'- phosphorothioate
  source 1..23: mol_type = other RNA
aatggaatactcttggttacatg

SEQ ID NO: 725 - RNA, 23 nt, synthetic construct
  misc_feature 1..23: note = Synthetic
  source 1..23: mol_type = other RNA
catgtaaccaagagtattccatt

SEQ ID NO: 726 - RNA, 21 nt, synthetic construct
  misc_feature 1..21: note = Synthetic
  modified_base 1: mod_base = OTHER; note = 2'-O-methylguanosine-3'- phosphorothioate
  modified_base 2: mod_base = OTHER; note = 2'-O-methyluridine-3'-phosphorothioate
  modified_base 7: mod_base = OTHER; note = 2'-fluoroadenosine-3'-phosphate
  modified_base 9: mod_base = OTHER; note = 2'-fluoroguanosine-3'-phosphate
  modified_base 10: mod_base = OTHER; note = 2'-fluoroadenosine-3'-phosphate
  modified_base 11: mod_base = OTHER; note = 2'-fluoroguanosine-3'-phosphate
  modified_base 21: mod_base = OTHER; note = L96
  source 1..21: mol_type = other RNA
gtaaccaagagtattccattt

SEQ ID NO: 727 - RNA, 23 nt, synthetic construct
  misc_feature 1..23: note = Synthetic
  modified_base 1: mod_base = OTHER; note = 2'-O-methyladenosine-3'- phosphorothioate
  modified_base 2: mod_base = OTHER; note = 2'-fluoroadenosine-3'-phosphorothioate
  modified_base 6: mod_base = OTHER; note = 2'-fluoroguanosine-3'-phosphate
  modified_base 7: mod_base = OTHER; note = Adenosine-glycol nucleic acid
  modified_base 14: mod_base = OTHER; note = 2'-fluorouridine-3'-phosphate
  modified_base 16: mod_base = OTHER; note = 2'-fluoroguanosine-3'-phosphate
  modified_base 21: mod_base = OTHER; note = 2'-O-methylcytidine-3'- phosphorothioate
  modified_base 22: mod_base = OTHER; note = 2'-O-methyladenosine-3'- phosphorothioate
  source 1..23: mol_type = other RNA
aaatggaatactcttggttacat

SEQ ID NO: 728 - RNA, 23 nt, synthetic construct
  misc_feature 1..23: note = Synthetic
  source 1..23: mol_type = other RNA
atgtaaccaagagtattccattt

SEQ ID NO: 729 - RNA, 21 nt, synthetic construct
  misc_feature 1..21: note = Synthetic
  modified_base 1: mod_base = OTHER; note = 2'-O-methyluridine-3'- phosphorothioate
  modified_base 2: mod_base = OTHER; note = 2'-O-methyladenosine-3'-phosphorothioate
  modified_base 7: mod_base = OTHER; note = 2'-fluoroadenosine-3'-phosphate
  modified_base 9: mod_base = OTHER; note = 2'-fluoroadenosine-3'-phosphate
  modified_base 10: mod_base = OTHER; note = 2'-fluoroguanosine-3'-phosphate
  modified_base 11: mod_base = OTHER; note = 2'-fluorouridine-3'-phosphate
  modified_base 21: mod_base = OTHER; note = L96
  source 1..21: mol_type = other RNA
taaccaagagtattccatttt

SEQ ID NO: 730 - RNA, 23 nt, synthetic construct
  misc_feature 1..23: note = Synthetic
  modified_base 1: mod_base = OTHER; note = 2'-O-methyladenosine-3'- phosphorothioate
  modified_base 2: mod_base = OTHER; note = 2'-fluoroadenosine-3'-phosphorothioate
  modified_base 6: mod_base = OTHER; note = 2'-fluoroguanosine-3'-phosphate
  modified_base 7: mod_base = OTHER; note = Adenosine-glycol nucleic acid
  modified_base 14: mod_base = OTHER; note = 2'-fluorocytidine-3'-phosphate
  modified_base 16: mod_base = OTHER; note = 2'-fluorouridine-3'-phosphate
  modified_base 21: mod_base = OTHER; note = 2'-O-methyladenosine-3'- phosphorothioate
  modified_base 22: mod_base = OTHER; note = 2'-O-methylcytidine-3'- phosphorothioate
  source 1..23: mol_type = other RNA
aaaatggaatactcttggttaca

SEQ ID NO: 731 - RNA, 23 nt, synthetic construct
  misc_feature 1..23: note = Synthetic
  source 1..23: mol_type = other RNA
tgtaaccaagagtattccatttt

SEQ ID NO: 732 - RNA, 21 nt, synthetic construct
  misc_feature 1..21: note = Synthetic
  modified_base 1: mod_base = OTHER; note = 2'-O-methyladenosine-3'- phosphorothioate
  modified_base 2: mod_base = OTHER; note = 2'-O-methylcytidine-3'-phosphorothioate
  modified_base 7: mod_base = OTHER; note = 2'-fluoroadenosine-3'-phosphate
  modified_base 9: mod_base = OTHER; note = 2'-fluorouridine-3'-phosphate
  modified_base 10: mod_base = OTHER; note = 2'-fluoroadenosine-3'-phosphate
  modified_base 11: mod_base = OTHER; note = 2'-fluorouridine-3'-phosphate
  modified_base 21: mod_base = OTHER; note = L96
  source 1..21: mol_type = other RNA
accaagagtattccattttta

SEQ ID NO: 733 - RNA, 23 nt, synthetic construct
  modified_base 7: mod_base = OTHER; note = thymine
  misc_feature 1..23: note = Synthetic
  modified_base 1: mod_base = OTHER; note = 2'-O-methyluridine-3'-phosphorothioate
  modified_base 2: mod_base = OTHER; note = 2'-fluoroadenosine -3'-phosphorothioate
  modified_base 6: mod_base = OTHER; note = 2'-fluoroadenosine-3'-phosphate
  modified_base 7: mod_base = OTHER; note = Thymidine-glycol nucleic acid
  modified_base 14: mod_base = OTHER; note = 2'-fluorocytidine-3'-phosphate
  modified_base 16: mod_base = OTHER; note = 2'-fluorocytidine-3'-phosphate
  modified_base 21: mod_base = OTHER; note = 2'-O-methyluridine-3'- phosphorothioate
  modified_base 22: mod_base = OTHER; note = 2'-O-methyluridine-3'- phosphorothioate
  source 1..23: mol_type = other RNA
taaaaatggaatactcttggtta

SEQ ID NO: 734 - RNA, 23 nt, synthetic construct
  misc_feature 1..23: note = Synthetic
  source 1..23: mol_type = other RNA
taaccaagagtattccattttta

SEQ ID NO: 735 - RNA, 21 nt, synthetic construct
  misc_feature 1..21: note = Synthetic
  modified_base 1: mod_base = OTHER; note = 2'-O-methylcytidine-3'- phosphorothioate
  modified_base 2: mod_base = OTHER; note = 2'-O-methylcytidine-3'-phosphorothioate
  modified_base 7: mod_base = OTHER; note = 2'-fluoroguanosine-3'-phosphate
  modified_base 9: mod_base = OTHER; note = 2'-fluoroadenosine-3'-phosphate
  modified_base 10: mod_base = OTHER; note = 2'-fluorouridine-3'-phosphate
  modified_base 11: mod_base = OTHER; note = 2'-fluorouridine-3'-phosphate
  modified_base 21: mod_base = OTHER; note = L96
  source 1..21: mol_type = other RNA
ccaagagtattccatttttat

SEQ ID NO: 736 - RNA, 23 nt, synthetic construct
  misc_feature 1..23: note = Synthetic
  modified_base 1: mod_base = OTHER; note = 2'-O-methyladenosine-3'-phosphorothioate
  modified_base 2: mod_base = OTHER; note = 2'-fluorouridine -3'-phosphorothioate
  modified_base 6: mod_base = OTHER; note = 2'-fluoroadenosine-3'-phosphate
  modified_base 7: mod_base = OTHER; note = Adenosine-glycol nucleic acid
  modified_base 14: mod_base = OTHER; note = 2'-fluoroadenosine-3'-phosphate
  modified_base 16: mod_base = OTHER; note = 2'-fluorouridine-3'-phosphate
  modified_base 21: mod_base = OTHER; note = 2'-O-methylguanosine-3'- phosphorothioate
  modified_base 22: mod_base = OTHER; note = 2'-O-methyluridine-3'- phosphorothioate
  source 1..23: mol_type = other RNA
ataaaaatggaatactcttggtt

SEQ ID NO: 737 - RNA, 23 nt, synthetic construct
  misc_feature 1..23: note = Synthetic
  source 1..23: mol_type = other RNA
aaccaagagtattccatttttac

SEQ ID NO: 738 - RNA, 21 nt, synthetic construct
  misc_feature 1..21: note = Synthetic
  modified_base 1: mod_base = OTHER; note = 2'-O-methylcytidine-3'- phosphorothioate
  modified_base 2: mod_base = OTHER; note = 2'-O-methyladenosine-3'-phosphorothioate
  modified_base 7: mod_base = OTHER; note = 2'-fluorouridine-3'-phosphate
  modified_base 9: mod_base = OTHER; note = 2'-fluorouridine-3'-phosphate
  modified_base 10: mod_base = OTHER; note = 2'-fluorouridine-3'-phosphate
  modified_base 11: mod_base = OTHER; note = 2'-fluorocytidine-3'-phosphate
  modified_base 21: mod_base = OTHER; note = L96
  source 1..21: mol_type = other RNA
caagagtattccatttttact

SEQ ID NO: 739 - RNA, 23 nt, synthetic construct
  misc_feature 1..23: note = Synthetic
  modified_base 1: mod_base = OTHER; note = 2'-O-methyladenosine-3'- phosphorothioate
  modified_base 2: mod_base = OTHER; note = 2'-fluoroguanosine-3'-phosphorothioate
  modified_base 6: mod_base = OTHER; note = 2'-fluoroadenosine-3'-phosphorothioate
  modified_base 7: mod_base = OTHER; note = Adenosine-glycol nucleic acid
  modified_base 14: mod_base = OTHER; note = 2'-fluorouridine-3'-phosphate
  modified_base 16: mod_base = OTHER; note = 2'-fluorocytidine-3'-phosphate
  modified_base 21: mod_base = OTHER; note = 2'-O-methylguanosine-3'- phosphorothioate
  modified_base 22: mod_base = OTHER; note = 2'-O-methylguanosine-3'- phosphorothioate
  source 1..23: mol_type = other RNA
agtaaaaatggaatactcttggt

SEQ ID NO: 740 - RNA, 23 nt, synthetic construct
  misc_feature 1..23: note = Synthetic
  source 1..23: mol_type = other RNA
accaagagtattccatttttact

SEQ ID NO: 741 - RNA, 21 nt, synthetic construct
  misc_feature 1..21: note = Synthetic
  modified_base 1: mod_base = OTHER; note = 2'-O-methyladenosine-3'- phosphorothioate
  modified_base 2: mod_base = OTHER; note = 2'-O-methyladenosine-3'-phosphorothioate
  modified_base 7: mod_base = OTHER; note = 2'-fluoroadenosine-3'-phosphate
  modified_base 9: mod_base = OTHER; note = 2'-fluorouridine-3'-phosphate
  modified_base 10: mod_base = OTHER; note = 2'-fluorocytidine-3'-phosphate
  modified_base 11: mod_base = OTHER; note = 2'-fluorocytidine-3'-phosphate
  modified_base 21: mod_base = OTHER; note = L96
  source 1..21: mol_type = other RNA
aagagtattccatttttacta

SEQ ID NO: 742 - RNA, 23 nt, synthetic construct
  misc_feature 1..23: note = Synthetic
  modified_base 1: mod_base = OTHER; note = 2'-O-methyluridine-3'- phosphorothioate
  modified_base 2: mod_base = OTHER; note = 2'-fluoroadenosine-3'-phosphorothioate
  modified_base 6: mod_base = OTHER; note = 2'-fluoroadenosine-3'-phosphate
  modified_base 7: mod_base = OTHER; note = Adenosine-glycol nucleic acid
  modified_base 14: mod_base = OTHER; note = 2'-fluoroadenosine-3'-phosphate
  modified_base 16: mod_base = OTHER; note = 2'-fluoroadenosine-3'-phosphate
  modified_base 21: mod_base = OTHER; note = 2'-O-methyluridine-3'- phosphorothioate
  modified_base 22: mod_base = OTHER; note = 2'-O-methylguanosine-3'- phosphorothioate
  source 1..23: mol_type = other RNA
tagtaaaaatggaatactcttgg

SEQ ID NO: 743 - RNA, 23 nt, synthetic construct
  misc_feature 1..23: note = Synthetic
  source 1..23: mol_type = other RNA
ccaagagtattccatttttacta

SEQ ID NO: 744 - RNA, 21 nt, synthetic construct
  misc_feature 1..21: note = Synthetic
  modified_base 1: mod_base = OTHER; note = 2'-O-methyladenosine-3'- phosphorothioate
  modified_base 2: mod_base = OTHER; note = 2'-O-methylguanosine-3'-phosphorothioate
  modified_base 7: mod_base = OTHER; note = 2'-fluorouridine-3'-phosphate
  modified_base 9: mod_base = OTHER; note = 2'-fluorocytidine-3'-phosphate
  modified_base 10: mod_base = OTHER; note = 2'-fluorocytidine-3'-phosphate
  modified_base 11: mod_base = OTHER; note = 2'-fluoroadenosine-3'-phosphate
  modified_base 21: mod_base = OTHER; note = L96
  source 1..21: mol_type = other RNA
agagtattccatttttactaa

SEQ ID NO: 745 - RNA, 23 nt, synthetic construct
  misc_feature 1..23: note = Synthetic
  modified_base 1: mod_base = OTHER; note = 2'-O-methyluridine-3'- phosphorothioate
  modified_base 2: mod_base = OTHER; note = 2'-fluoroadenosine-3'-phosphorothioate
  modified_base 6: mod_base = OTHER; note = 2'-fluoroadenosine-3'-phosphate
  modified_base 7: mod_base = OTHER; note = Adenosine-glycol nucleic acid
  modified_base 14: mod_base = OTHER; note = 2'-fluoroadenosine-3'-phosphate
  modified_base 16: mod_base = OTHER; note = 2'-fluorouridine-3'-phosphate
  modified_base 21: mod_base = OTHER; note = 2'-O-methyluridine-3'- phosphorothioate
  modified_base 22: mod_base = OTHER; note = 2'-O-methyluridine-3'- phosphorothioate
  source 1..23: mol_type = other RNA
ttagtaaaaatggaatactcttg

SEQ ID NO: 746 - RNA, 23 nt, synthetic construct
  misc_feature 1..23: note = Synthetic
  source 1..23: mol_type = other RNA
caagagtattccatttttactaa

SEQ ID NO: 747 - RNA, 21 nt, synthetic construct
  misc_feature 1..21: note = Synthetic
  modified_base 1: mod_base = OTHER; note = 2'-O-methylguanosine-3'- phosphorothioate
  modified_base 2: mod_base = OTHER; note = 2'-O-methyladenosine-3'-phosphorothioate
  modified_base 7: mod_base = OTHER; note = 2'-fluorouridine-3'-phosphate
  modified_base 9: mod_base = OTHER; note = 2'-fluorocytidine-3'-phosphate
  modified_base 10: mod_base = OTHER; note = 2'-fluoroadenosine-3'-phosphate
  modified_base 11: mod_base = OTHER; note = 2'-fluorouridine-3'-phosphate
  modified_base 21: mod_base = OTHER; note = L96
  source 1..21: mol_type = other RNA
gagtattccatttttactaaa

SEQ ID NO: 748 - RNA, 23 nt, synthetic construct
  misc_feature 1..23: note = Synthetic
  modified_base 1: mod_base = OTHER; note = 2'-O-methyluridine-3'- phosphorothioate
  modified_base 2: mod_base = OTHER; note = 2'-fluorouridine-3'-phosphorothioate
  modified_base 6: mod_base = OTHER; note = 2'-fluorouridine-3'-phosphate
  modified_base 7: mod_base = OTHER; note = Adenosine-glycol nucleic acid
  modified_base 14: mod_base = OTHER; note = 2'-fluoroguanosine-3'-phosphate
  modified_base 16: mod_base = OTHER; note = 2'-fluoroadenosine-3'-phosphate
  modified_base 21: mod_base = OTHER; note = 2'-O-methylcytidine-3'- phosphorothioate
  modified_base 22: mod_base = OTHER; note = 2'-O-methyluridine-3'- phosphorothioate
  source 1..23: mol_type = other RNA
tttagtaaaaatggaatactctt

SEQ ID NO: 749 - RNA, 23 nt, synthetic construct
  misc_feature 1..23: note = Synthetic
  source 1..23: mol_type = other RNA
aagagtattccatttttactaaa

SEQ ID NO: 750 - RNA, 21 nt, synthetic construct
  misc_feature 1..21: note = Synthetic
  modified_base 1: mod_base = OTHER; note = 2'-O-methyladenosine-3'- phosphorothioate
  modified_base 2: mod_base = OTHER; note = 2'-O-methylguanosine-3'-phosphorothioate
  modified_base 7: mod_base = OTHER; note = 2'-fluorocytidine-3'-phosphate
  modified_base 9: mod_base = OTHER; note = 2'-fluoroadenosine-3'-phosphate
  modified_base 10: mod_base = OTHER; note = 2'-fluorouridine-3'-phosphate
  modified_base 11: mod_base = OTHER; note = 2'-fluorouridine-3'-phosphate
  modified_base 21: mod_base = OTHER; note = L96
  source 1..21: mol_type = other RNA
agtattccatttttactaaat

SEQ ID NO: 751 - RNA, 23 nt, synthetic construct
  modified_base 7: mod_base = OTHER; note = thymine
  misc_feature 1..23: note = Synthetic
  modified_base 1: mod_base = OTHER; note = 2'-O-methyladenosine-3'-phosphorothioate
  modified_base 2: mod_base = OTHER; note = 2'-fluorouridine -3'-phosphorothioate
  modified_base 6: mod_base = OTHER; note = 2'-fluoroguanosine-3'-phosphate
  modified_base 7: mod_base = OTHER; note = Thymidine-glycol nucleic acid
  modified_base 14: mod_base = OTHER; note = 2'-fluoroguanosine-3'-phosphate
  modified_base 16: mod_base = OTHER; note = 2'-fluoroadenosine-3'-phosphate
  modified_base 21: mod_base = OTHER; note = 2'-O-methyluridine-3'- phosphorothioate
  modified_base 22: mod_base = OTHER; note = 2'-O-methylcytidine-3'- phosphorothioate
  source 1..23: mol_type = other RNA
atttagtaaaaatggaatactct

SEQ ID NO: 752 - RNA, 23 nt, synthetic construct
  misc_feature 1..23: note = Synthetic
  source 1..23: mol_type = other RNA
agagtattccatttttactaaag

SEQ ID NO: 753 - RNA, 21 nt, synthetic construct
  misc_feature 1..21: note = Synthetic
  modified_base 1: mod_base = OTHER; note = 2'-O-methylguanosine-3'- phosphorothioate
  modified_base 2: mod_base = OTHER; note = 2'-O-methyluridine-3'-phosphorothioate
  modified_base 7: mod_base = OTHER; note = 2'-fluorocytidine-3'-phosphate
  modified_base 9: mod_base = OTHER; note = 2'-fluorouridine-3'-phosphate
  modified_base 10: mod_base = OTHER; note = 2'-fluorouridine-3'-phosphate
  modified_base 11: mod_base = OTHER; note = 2'-fluorouridine-3'-phosphate
  modified_base 21: mod_base = OTHER; note = L96
  source 1..21: mol_type = other RNA
gtattccatttttactaaagt

SEQ ID NO: 754 - RNA, 23 nt, synthetic construct
  misc_feature 1..23: note = Synthetic
  modified_base 1: mod_base = OTHER; note = 2'-O-methyladenosine-3'- phosphorothioate
  modified_base 2: mod_base = OTHER; note = 2'-fluorocytidine-3'-phosphorothioate
  modified_base 6: mod_base = OTHER; note = Adenosine-glycol nucleic acid
  modified_base 14: mod_base = OTHER; note = 2'-fluorouridine-3'-phosphate
  modified_base 16: mod_base = OTHER; note = 2'-fluoroguanosine-3'-phosphate
  modified_base 21: mod_base = OTHER; note = 2'-O-methylcytidine-3'- phosphorothioate
  modified_base 22: mod_base = OTHER; note = 2'-O-methyluridine-3'- phosphorothioate
  source 1..23: mol_type = other RNA
actttagtaaaaatggaatactc

SEQ ID NO: 755 - RNA, 23 nt, synthetic construct
  misc_feature 1..23: note = Synthetic
  source 1..23: mol_type = other RNA
gagtattccatttttactaaagc

SEQ ID NO: 756 - RNA, 21 nt, synthetic construct
  misc_feature 1..21: note = Synthetic
  modified_base 1: mod_base = OTHER; note = 2'-O-methyluridine-3'- phosphorothioate
  modified_base 2: mod_base = OTHER; note = 2'-O-methyladenosine-3'-phosphorothioate
  modified_base 7: mod_base = OTHER; note = 2'-fluoroadenosine-3'-phosphate
  modified_base 9: mod_base = OTHER; note = 2'-fluorouridine-3'-phosphate
  modified_base 10: mod_base = OTHER; note = 2'-fluorouridine-3'-phosphate
  modified_base 11: mod_base = OTHER; note = 2'-fluorouridine-3'-phosphate
  modified_base 21: mod_base = OTHER; note = L96
  source 1..21: mol_type = other RNA
tattccatttttactaaagca

SEQ ID NO: 757 - RNA, 23 nt, synthetic construct
  misc_feature 1..23: note = Synthetic
  modified_base 1: mod_base = OTHER; note = 2'-O-methyluridine-3'- phosphorothioate
  modified_base 2: mod_base = OTHER; note = 2'-fluoroguanosine-3'-phosphorothioate
  modified_base 6: mod_base = OTHER; note = 2'-fluorouridine-3'-phosphate
  modified_base 7: mod_base = OTHER; note = Adenosine-glycol nucleic acid
  modified_base 14: mod_base = OTHER; note = 2'-fluoroadenosine-3'-phosphate
  modified_base 16: mod_base = OTHER; note = 2'-fluoroguanosine-3'-phosphate
  modified_base 21: mod_base = OTHER; note = 2'-O-methyladenosine-3'- phosphorothioate
  modified_base 22: mod_base = OTHER; note = 2'-O-methylcytidine-3'- phosphorothioate
  source 1..23: mol_type = other RNA
tgctttagtaaaaatggaatact

SEQ ID NO: 758 - RNA, 23 nt, synthetic construct
  misc_feature 1..23: note = Synthetic
  source 1..23: mol_type = other RNA
agtattccatttttactaaagca

SEQ ID NO: 759 - RNA, 21 nt, synthetic construct
  misc_feature 1..21: note = Synthetic
  modified_base 1: mod_base = OTHER; note = 2'-O-methyladenosine-3'- phosphorothioate
  modified_base 2: mod_base = OTHER; note = 2'-O-methyluridine-3'-phosphorothioate
  modified_base 7: mod_base = OTHER; note = 2'-fluorouridine-3'-phosphate
  modified_base 9: mod_base = OTHER; note = 2'-fluorouridine-3'-phosphate
  modified_base 10: mod_base = OTHER; note = 2'-fluorouridine-3'-phosphate
  modified_base 11: mod_base = OTHER; note = 2'-fluorouridine-3'-phosphate
  modified_base 21: mod_base = OTHER; note = L96
  source 1..21: mol_type = other RNA
attccatttttactaaagcat

SEQ ID NO: 760 - RNA, 23 nt, synthetic construct
  modified_base 7: mod_base = OTHER; note = thymine
  misc_feature 1..23: note = Synthetic
  modified_base 1: mod_base = OTHER; note = 2'-O-methyladenosine-3'-phosphorothioate
  modified_base 2: mod_base = OTHER; note = 2'-fluorouridine -3'-phosphorothioate
  modified_base 6: mod_base = OTHER; note = 2'-fluorouridine-3'-phosphate
  modified_base 7: mod_base = OTHER; note = Thymidine-glycol nucleic acid
  modified_base 14: mod_base = OTHER; note = 2'-fluoroadenosine-3'-phosphate
  modified_base 16: mod_base = OTHER; note = 2'-fluorouridine-3'-phosphate
  modified_base 21: mod_base = OTHER; note = 2'-O-methyluridine-3'- phosphorothioate
  modified_base 22: mod_base = OTHER; note = 2'-O-methyladenosine-3'- phosphorothioate
  source 1..23: mol_type = other RNA
atgctttagtaaaaatggaatac

SEQ ID NO: 761 - RNA, 23 nt, synthetic construct
  misc_feature 1..23: note = Synthetic
  source 1..23: mol_type = other RNA
gtattccatttttactaaagcag

SEQ ID NO: 762 - RNA, 21 nt, synthetic construct
  misc_feature 1..21: note = Synthetic
  modified_base 1: mod_base = OTHER; note = 2'-O-methyluridine-3'- phosphorothioate
  modified_base 2: mod_base = OTHER; note = 2'-O-methyluridine-3'-phosphorothioate
  modified_base 7: mod_base = OTHER; note = 2'-fluorouridine-3'-phosphate
  modified_base 9: mod_base = OTHER; note = 2'-fluorouridine-3'-phosphate
  modified_base 10: mod_base = OTHER; note = 2'-fluorouridine-3'-phosphate
  modified_base 11: mod_base = OTHER; note = 2'-fluoroadenosine-3'-phosphate
  modified_base 21: mod_base = OTHER; note = L96
  source 1..21: mol_type = other RNA
ttccatttttactaaagcagt

SEQ ID NO: 763 - RNA, 23 nt, synthetic construct
  modified_base 7: mod_base = OTHER; note = thymine
  misc_feature 1..23: note = Synthetic
  modified_base 1: mod_base = OTHER; note = 2'-O-methyladenosine-3'-phosphorothioate
  modified_base 2: mod_base = OTHER; note = 2'-fluorocytidine -3'-phosphorothioate
  modified_base 6: mod_base = OTHER; note = 2'-fluorouridine-3'-phosphate
  modified_base 7: mod_base = OTHER; note = Thymidine-glycol nucleic acid
  modified_base 14: mod_base = OTHER; note = 2'-fluoroadenosine-3'-phosphate
  modified_base 16: mod_base = OTHER; note = 2'-fluoroadenosine-3'-phosphate
  modified_base 21: mod_base = OTHER; note = 2'-O-methyladenosine-3'- phosphorothioate
  modified_base 22: mod_base = OTHER; note = 2'-O-methyluridine-3'- phosphorothioate
  source 1..23: mol_type = other RNA
actgctttagtaaaaatggaata

SEQ ID NO: 764 - RNA, 23 nt, synthetic construct
  misc_feature 1..23: note = Synthetic
  source 1..23: mol_type = other RNA
tattccatttttactaaagcagt

SEQ ID NO: 765 - RNA, 21 nt, synthetic construct
  misc_feature 1..21: note = Synthetic
  modified_base 1: mod_base = OTHER; note = 2'-O-methyluridine-3'- phosphorothioate
  modified_base 2: mod_base = OTHER; note = 2'-O-methylcytidine-3'-phosphorothioate
  modified_base 7: mod_base = OTHER; note = 2'-fluorouridine-3'-phosphate
  modified_base 9: mod_base = OTHER; note = 2'-fluorouridine-3'-phosphate
  modified_base 10: mod_base = OTHER; note = 2'-fluoroadenosine-3'-phosphate
  modified_base 11: mod_base = OTHER; note = 2'-fluorocytidine-3'-phosphate
  modified_base 21: mod_base = OTHER; note = L96
  source 1..21: mol_type = other RNA
tccatttttactaaagcagtt

SEQ ID NO: 766 - RNA, 23 nt, synthetic construct
  modified_base 7: mod_base = OTHER; note = thymine
  misc_feature 1..23: note = Synthetic
  modified_base 1: mod_base = OTHER; note = 2'-O-methyladenosine-3'- phosphorothioate
  modified_base 2: mod_base = OTHER; note = 2'-fluoroadenosine-3'-phosphorothioate
  modified_base 6: mod_base = OTHER; note = 2'-fluorocytidine-3'-phosphate
  modified_base 7: mod_base = OTHER; note = Thymidine-glycol nucleic acid
  modified_base 14: mod_base = OTHER; note = 2'-fluoroadenosine-3'-phosphate
  modified_base 16: mod_base = OTHER; note = 2'-fluoroadenosine-3'-phosphate
  modified_base 21: mod_base = OTHER; note = 2'-O-methyladenosine-3'- phosphorothioate
  modified_base 22: mod_base = OTHER; note = 2'-O-methyladenosine-3'- phosphorothioate
  source 1..23: mol_type = other RNA
aactgctttagtaaaaatggaat

SEQ ID NO: 767 - RNA, 23 nt, synthetic construct
  misc_feature 1..23: note = Synthetic
  source 1..23: mol_type = other RNA
attccatttttactaaagcagtg

SEQ ID NO: 768 - RNA, 21 nt, synthetic construct
  misc_feature 1..21: note = Synthetic
  modified_base 1: mod_base = OTHER; note = 2'-O-methylcytidine-3'- phosphorothioate
  modified_base 2: mod_base = OTHER; note = 2'-O-methylcytidine-3'-phosphorothioate
  modified_base 7: mod_base = OTHER; note = 2'-fluorouridine-3'-phosphate
  modified_base 9: mod_base = OTHER; note = 2'-fluoroadenosine-3'-phosphate
  modified_base 10: mod_base = OTHER; note = 2'-fluorocytidine-3'-phosphate
  modified_base 11: mod_base = OTHER; note = 2'-fluorouridine-3'-phosphate
  modified_base 21: mod_base = OTHER; note = L96
  source 1..21: mol_type = other RNA
ccatttttactaaagcagtgt

SEQ ID NO: 769 - RNA, 23 nt, synthetic construct
  misc_feature 1..23: note = Synthetic
  modified_base 1: mod_base = OTHER; note = 2'-O-methyladenosine-3'- phosphorothioate
  modified_base 2: mod_base = OTHER; note = 2'-fluorocytidine-3'-phosphorothioate
  modified_base 6: mod_base = OTHER; note = 2'-fluoroguanosine-3'-phosphate
  modified_base 7: mod_base = OTHER; note = Cytidine-glycol nucleic acid
  modified_base 14: mod_base = OTHER; note = 2'-fluoroadenosine-3'-phosphate
  modified_base 16: mod_base = OTHER; note = 2'-fluoroadenosine-3'-phosphate
  modified_base 21: mod_base = OTHER; note = 2'-O-methylguanosine-3'- phosphorothioate
  modified_base 22: mod_base = OTHER; note = 2'-O-methyladenosine-3'- phosphorothioate
  source 1..23: mol_type = other RNA
acactgctttagtaaaaatggaa

SEQ ID NO: 770 - RNA, 23 nt, synthetic construct
  misc_feature 1..23: note = Synthetic
  source 1..23: mol_type = other RNA
ttccatttttactaaagcagtgt

SEQ ID NO: 771 - RNA, 21 nt, synthetic construct
  misc_feature 1..21: note = Synthetic
  modified_base 1: mod_base = OTHER; note = 2'-O-methylcytidine-3'- phosphorothioate
  modified_base 2: mod_base = OTHER; note = 2'-O-methyladenosine-3'-phosphorothioate
  modified_base 7: mod_base = OTHER; note = 2'-fluorouridine-3'-phosphate
  modified_base 9: mod_base = OTHER; note = 2'-fluorocytidine-3'-phosphate
  modified_base 10: mod_base = OTHER; note = 2'-fluorouridine-3'-phosphate
  modified_base 11: mod_base = OTHER; note = 2'-fluoroadenosine-3'-phosphate
  modified_base 21: mod_base = OTHER; note = L96
  source 1..21: mol_type = other RNA
catttttactaaagcagtgtt

SEQ ID NO: 772 - RNA, 23 nt, synthetic construct
  modified_base 6: mod_base = OTHER; note = thymine
  misc_feature 1..23: note = Synthetic
  modified_base 1: mod_base = OTHER; note = 2'-O-methyladenosine-3'- phosphorothioate
  modified_base 2: mod_base = OTHER; note = 2'-fluoroadenosine-3'-phosphorothioate
  modified_base 6: mod_base = OTHER; note = Thymidine-glycol nucleic acid
  modified_base 14: mod_base = OTHER; note = 2'-fluorouridine-3'-phosphate
  modified_base 16: mod_base = OTHER; note = 2'-fluoroadenosine-3'-phosphate
  modified_base 21: mod_base = OTHER; note = 2'-O-methylguanosine-3'- phosphorothioate
  modified_base 22: mod_base = OTHER; note = 2'-O-methylguanosine-3'- phosphorothioate
  source 1..23: mol_type = other RNA
aacactgctttagtaaaaatgga

SEQ ID NO: 773 - RNA, 23 nt, synthetic construct
  misc_feature 1..23: note = Synthetic
  source 1..23: mol_type = other RNA
tccatttttactaaagcagtgtt

SEQ ID NO: 774 - RNA, 21 nt, synthetic construct
  misc_feature 1..21: note = Synthetic
  modified_base 1: mod_base = OTHER; note = 2'-O-methyladenosine-3'- phosphorothioate
  modified_base 2: mod_base = OTHER; note = 2'-O-methyluridine-3'-phosphorothioate
  modified_base 7: mod_base = OTHER; note = 2'-fluoroadenosine-3'-phosphate
  modified_base 9: mod_base = OTHER; note = 2'-fluorouridine-3'-phosphate
  modified_base 10: mod_base = OTHER; note = 2'-fluoroadenosine-3'-phosphate
  modified_base 11: mod_base = OTHER; note = 2'-fluoroadenosine-3'-phosphate
  modified_base 21: mod_base = OTHER; note = L96
  source 1..21: mol_type = other RNA
atttttactaaagcagtgttt

SEQ ID NO: 775 - RNA, 23 nt, synthetic construct
  modified_base 7: mod_base = OTHER; note = thymine
  misc_feature 1..23: note = Synthetic
  modified_base 1: mod_base = OTHER; note = 2'-O-methyladenosine-3'- phosphorothioate
  modified_base 2: mod_base = OTHER; note = 2'-fluoroadenosine-3'-phosphorothioate
  modified_base 6: mod_base = OTHER; note = 2'-fluorocytidine-3'-phosphate
  modified_base 7: mod_base = OTHER; note = Thymidine-glycol nucleic acid
  modified_base 14: mod_base = OTHER; note = 2'-fluoroguanosine-3'-phosphate
  modified_base 16: mod_base = OTHER; note = 2'-fluoroadenosine-3'-phosphate
  modified_base 21: mod_base = OTHER; note = 2'-O-methyluridine-3'- phosphorothioate
  modified_base 22: mod_base = OTHER; note = 2'-O-methylguanosine-3'- phosphorothioate
  source 1..23: mol_type = other RNA
aaacactgctttagtaaaaatgg

SEQ ID NO: 776 - RNA, 23 nt, synthetic construct
  misc_feature 1..23: note = Synthetic
  source 1..23: mol_type = other RNA
ccatttttactaaagcagtgttt

SEQ ID NO: 777 - RNA, 21 nt, synthetic construct
  misc_feature 1..21: note = Synthetic
  modified_base 1: mod_base = OTHER; note = 2'-O-methyluridine-3'- phosphorothioate
  modified_base 2: mod_base = OTHER; note = 2'-O-methyluridine-3'-phosphorothioate
  modified_base 7: mod_base = OTHER; note = 2'-fluorocytidine-3'-phosphate
  modified_base 9: mod_base = OTHER; note = 2'-fluoroadenosine-3'-phosphate
  modified_base 10: mod_base = OTHER; note = 2'-fluoroadenosine-3'-phosphate
  modified_base 11: mod_base = OTHER; note = 2'-fluoroadenosine-3'-phosphate
  modified_base 21: mod_base = OTHER; note = L96
  source 1..21: mol_type = other RNA
tttttactaaagcagtgtttt

SEQ ID NO: 778 - RNA, 23 nt, synthetic construct
  misc_feature 1..23: note = Synthetic
  modified_base 1: mod_base = OTHER; note = 2'-O-methyladenosine-3'- phosphorothioate
  modified_base 2: mod_base = OTHER; note = 2'-fluoroadenosine-3'-phosphorothioate
  modified_base 6: mod_base = OTHER; note = 2'-fluoroadenosine-3'-phosphate
  modified_base 7: mod_base = OTHER; note = Cytidine-glycol nucleic acid
  modified_base 14: mod_base = OTHER; note = 2'-fluoroadenosine-3'-phosphate
  modified_base 16: mod_base = OTHER; note = 2'-fluorouridine-3'-phosphate
  modified_base 21: mod_base = OTHER; note = 2'-O-methyladenosine-3'- phosphorothioate
  modified_base 22: mod_base = OTHER; note = 2'-O-methyluridine-3'- phosphorothioate
  source 1..23: mol_type = other RNA
aaaacactgctttagtaaaaatg

SEQ ID NO: 779 - RNA, 23 nt, synthetic construct
  misc_feature 1..23: note = Synthetic
  source 1..23: mol_type = other RNA
catttttactaaagcagtgtttt

SEQ ID NO: 780 - RNA, 21 nt, synthetic construct
  misc_feature 1..21: note = Synthetic
  modified_base 1: mod_base = OTHER; note = 2'-O-methyluridine-3'- phosphorothioate
  modified_base 2: mod_base = OTHER; note = 2'-O-methyluridine-3'-phosphorothioate
  modified_base 7: mod_base = OTHER; note = 2'-fluorouridine-3'-phosphate
  modified_base 9: mod_base = OTHER; note = 2'-fluoroadenosine-3'-phosphate
  modified_base 10: mod_base = OTHER; note = 2'-fluoroadenosine-3'-phosphate
  modified_base 11: mod_base = OTHER; note = 2'-fluoroguanosine-3'-phosphate
  modified_base 21: mod_base = OTHER; note = L96
  source 1..21: mol_type = other RNA
ttttactaaagcagtgttttt

SEQ ID NO: 781 - RNA, 23 nt, synthetic construct
  misc_feature 1..23: note = Synthetic
  modified_base 1: mod_base = OTHER; note = 2'-O-methyladenosine-3'- phosphorothioate
  modified_base 2: mod_base = OTHER; note = 2'-fluoroadenosine-3'-phosphorothioate
  modified_base 6: mod_base = OTHER; note = 2'-fluorocytidine-3'-phosphate
  modified_base 7: mod_base = OTHER; note = Adenosine-glycol nucleic acid
  modified_base 14: mod_base = OTHER; note = 2'-fluorouridine-3'-phosphate
  modified_base 16: mod_base = OTHER; note = 2'-fluoroguanosine-3'-phosphate
  modified_base 21: mod_base = OTHER; note = 2'-O-methyladenosine-3'- phosphorothioate
  modified_base 22: mod_base = OTHER; note = 2'-O-methyladenosine-3'- phosphorothioate
  source 1..23: mol_type = other RNA
aaaaacactgctttagtaaaaat

SEQ ID NO: 782 - RNA, 23 nt, synthetic construct
  misc_feature 1..23: note = Synthetic
  source 1..23: mol_type = other RNA
atttttactaaagcagtgttttc

SEQ ID NO: 783 - RNA, 21 nt, synthetic construct
  misc_feature 1..21: note = Synthetic
  modified_base 1: mod_base = OTHER; note = 2'-O-methyluridine-3'- phosphorothioate
  modified_base 2: mod_base = OTHER; note = 2'-O-methyluridine-3'-phosphorothioate
  modified_base 7: mod_base = OTHER; note = 2'-fluoroadenosine-3'-phosphate
  modified_base 9: mod_base = OTHER; note = 2'-fluoroadenosine-3'-phosphate
  modified_base 10: mod_base = OTHER; note = 2'-fluoroguanosine-3'-phosphate
  modified_base 11: mod_base = OTHER; note = 2'-fluorocytidine-3'-phosphate
  modified_base 21: mod_base = OTHER; note = L96
  source 1..21: mol_type = other RNA
tttactaaagcagtgttttca

SEQ ID NO: 784 - RNA, 23 nt, synthetic construct
  misc_feature 1..23: note = Synthetic
  modified_base 1: mod_base = OTHER; note = 2'-O-methyluridine-3'- phosphorothioate
  modified_base 2: mod_base = OTHER; note = 2'-fluoroguanosine-3'-phosphorothioate
  modified_base 6: mod_base = OTHER; note = 2'-fluoroadenosine-3'-phosphate
  modified_base 7: mod_base = OTHER; note = Cytidine-glycol nucleic acid
  modified_base 14: mod_base = OTHER; note = 2'-fluorouridine-3'-phosphate
  modified_base 16: mod_base = OTHER; note = 2'-fluoroadenosine-3'-phosphate
  modified_base 21: mod_base = OTHER; note = 2'-O-methyladenosine-3'- phosphorothioate
  modified_base 22: mod_base = OTHER; note = 2'-O-methyladenosine-3'- phosphorothioate
  source 1..23: mol_type = other RNA
tgaaaacactgctttagtaaaaa

SEQ ID NO: 785 - RNA, 23 nt, synthetic construct
  misc_feature 1..23: note = Synthetic
  source 1..23: mol_type = other RNA
tttttactaaagcagtgttttca

SEQ ID NO: 786 - RNA, 21 nt, synthetic construct
  misc_feature 1..21: note = Synthetic
  modified_base 1: mod_base = OTHER; note = 2'-O-methyluridine-3'- phosphorothioate
  modified_base 2: mod_base = OTHER; note = 2'-O-methyluridine-3'-phosphorothioate
  modified_base 7: mod_base = OTHER; note = 2'-fluoroadenosine-3'-phosphate
  modified_base 9: mod_base = OTHER; note = 2'-fluoroguanosine-3'-phosphate
  modified_base 10: mod_base = OTHER; note = 2'-fluorocytidine-3'-phosphate
  modified_base 11: mod_base = OTHER; note = 2'-fluoroadenosine-3'-phosphate
  modified_base 21: mod_base = OTHER; note = L96
  source 1..21: mol_type = other RNA
ttactaaagcagtgttttcat

SEQ ID NO: 787 - RNA, 23 nt, synthetic construct
  misc_feature 1..23: note = Synthetic
  modified_base 1: mod_base = OTHER; note = 2'-O-methyladenosine-3'-phosphorothioate
  modified_base 2: mod_base = OTHER; note = 2'-fluorouridine -3'-phosphorothioate
  modified_base 6: mod_base = OTHER; note = 2'-fluoroadenosine-3'-phosphate
  modified_base 7: mod_base = OTHER; note = Adenosine-glycol nucleic acid
  modified_base 14: mod_base = OTHER; note = 2'-fluorouridine-3'-phosphate
  modified_base 16: mod_base = OTHER; note = 2'-fluorouridine-3'-phosphate
  modified_base 21: mod_base = OTHER; note = 2'-O-methyladenosine-3'- phosphorothioate
  modified_base 22: mod_base = OTHER; note = 2'-O-methyladenosine-3'- phosphorothioate
  source 1..23: mol_type = other RNA
atgaaaacactgctttagtaaaa

SEQ ID NO: 788 - RNA, 23 nt, synthetic construct
  misc_feature 1..23: note = Synthetic
  source 1..23: mol_type = other RNA
ttttactaaagcagtgttttcac

SEQ ID NO: 789 - RNA, 21 nt, synthetic construct
  misc_feature 1..21: note = Synthetic
  modified_base 1: mod_base = OTHER; note = 2'-O-methyluridine-3'- phosphorothioate
  modified_base 2: mod_base = OTHER; note = 2'-O-methyladenosine-3'-phosphorothioate
  modified_base 7: mod_base = OTHER; note = 2'-fluoroadenosine-3'-phosphate
  modified_base 9: mod_base = OTHER; note = 2'-fluorocytidine-3'-phosphate
  modified_base 10: mod_base = OTHER; note = 2'-fluoroadenosine-3'-phosphate
  modified_base 11: mod_base = OTHER; note = 2'-fluorguanosine-3'-phosphate
  modified_base 21: mod_base = OTHER; note = L96
  source 1..21: mol_type = other RNA
tactaaagcagtgttttcact

SEQ ID NO: 790 - RNA, 23 nt, synthetic construct
  misc_feature 1..23: note = Synthetic
  modified_base 1: mod_base = OTHER; note = 2'-O-methyladenosine-3'- phosphorothioate
  modified_base 2: mod_base = OTHER; note = 2'-fluoroguanosine-3'-phosphorothioate
  modified_base 6: mod_base = OTHER; note = 2'-fluoroadenosine-3'-phosphate
  modified_base 7: mod_base = OTHER; note = Adenosine-glycol nucleic acid
  modified_base 14: mod_base = OTHER; note = 2'-fluorocytidine-3'-phosphate
  modified_base 16: mod_base = OTHER; note = 2'-fluorouridine-3'-phosphate
  modified_base 21: mod_base = OTHER; note = 2'-O-methyladenosine-3'- phosphorothioate
  modified_base 22: mod_base = OTHER; note = 2'-O-methyladenosine-3'- phosphorothioate
  source 1..23: mol_type = other RNA
agtgaaaacactgctttagtaaa

SEQ ID NO: 791 - RNA, 23 nt, synthetic construct
  misc_feature 1..23: note = Synthetic
  source 1..23: mol_type = other RNA
tttactaaagcagtgttttcacc

SEQ ID NO: 792 - RNA, 21 nt, synthetic construct
  misc_feature 1..21: note = Synthetic
  modified_base 1: mod_base = OTHER; note = 2'-O-methyladenosine-3'- phosphorothioate
  modified_base 2: mod_base = OTHER; note = 2'-O-methylcytidine-3'-phosphorothioate
  modified_base 7: mod_base = OTHER; note = 2'-fluoroguanosine-3'-phosphate
  modified_base 9: mod_base = OTHER; note = 2'-fluoroadenosine-3'-phosphate
  modified_base 10: mod_base = OTHER; note = 2'-fluoroguanosine-3'-phosphate
  modified_base 11: mod_base = OTHER; note = 2'-fluorouridine-3'-phosphate
  modified_base 21: mod_base = OTHER; note = L96
  source 1..21: mol_type = other RNA
actaaagcagtgttttcacct

SEQ ID NO: 793 - RNA, 23 nt, synthetic construct
  misc_feature 1..23: note = Synthetic
  modified_base 1: mod_base = OTHER; note = 2'-O-methyladenosine-3'- phosphorothioate
  modified_base 2: mod_base = OTHER; note = 2'-fluoroguanosine-3'-phosphorothioate
  modified_base 6: mod_base = OTHER; note = 2'-fluoroadenosine-3'-phosphate
  modified_base 7: mod_base = OTHER; note = Adenosine-glycol nucleic acid
  modified_base 14: mod_base = OTHER; note = 2'-fluoroguanosine-3'-phosphate
  modified_base 16: mod_base = OTHER; note = 2'-fluorouridine-3'-phosphate
  modified_base 21: mod_base = OTHER; note = 2'-O-methyluridine-3'- phosphorothioate
  modified_base 22: mod_base = OTHER; note = 2'-O-methyladenosine-3'- phosphorothioate
  source 1..23: mol_type = other RNA
aggtgaaaacactgctttagtaa

SEQ ID NO: 794 - RNA, 23 nt, synthetic construct
  misc_feature 1..23: note = Synthetic
  source 1..23: mol_type = other RNA
ttactaaagcagtgttttcacct

SEQ ID NO: 795 - RNA, 21 nt, synthetic construct
  misc_feature 1..21: note = Synthetic
  modified_base 1: mod_base = OTHER; note = 2'-O-methylcytidine-3'- phosphorothioate
  modified_base 2: mod_base = OTHER; note = 2'-O-methyluridine-3'-phosphorothioate
  modified_base 7: mod_base = OTHER; note = 2'-fluorocytidine-3'-phosphate
  modified_base 9: mod_base = OTHER; note = 2'-fluoroguanosine-3'-phosphate
  modified_base 10: mod_base = OTHER; note = 2'-fluorouridine-3'-phosphate
  modified_base 11: mod_base = OTHER; note = 2'-fluoroguanosine-3'-phosphate
  modified_base 21: mod_base = OTHER; note = L96
  source 1..21: mol_type = other RNA
ctaaagcagtgttttcacctt

SEQ ID NO: 796 - RNA, 23 nt, synthetic construct
  misc_feature 1..23: note = Synthetic
  modified_base 1: mod_base = OTHER; note = 2'-O-methyladenosine-3'- phosphorothioate
  modified_base 2: mod_base = OTHER; note = 2'-fluoroadenosine-3'-phosphorothioate
  modified_base 6: mod_base = OTHER; note = 2'-fluoroguanosine-3'-phosphate
  modified_base 7: mod_base = OTHER; note = Adenosine-glycol nucleic acid
  modified_base 14: mod_base = OTHER; note = 2'-fluorouridine-3'-phosphate
  modified_base 16: mod_base = OTHER; note = 2'-fluorocytidine-3'-phosphate
  modified_base 21: mod_base = OTHER; note = 2'-O-methylguanosine-3'- phosphorothioate
  modified_base 22: mod_base = OTHER; note = 2'-O-methyluridine-3'- phosphorothioate
  source 1..23: mol_type = other RNA
aaggtgaaaacactgctttagta

SEQ ID NO: 797 - RNA, 23 nt, synthetic construct
  misc_feature 1..23: note = Synthetic
  source 1..23: mol_type = other RNA
tactaaagcagtgttttcacctc

SEQ ID NO: 798 - RNA, 21 nt, synthetic construct
  misc_feature 1..21: note = Synthetic
  modified_base 1: mod_base = OTHER; note = 2'-O-methyluridine-3'- phosphorothioate
  modified_base 2: mod_base = OTHER; note = 2'-O-methyladenosine-3'-phosphorothioate
  modified_base 7: mod_base = OTHER; note = 2'-fluoroadenosine-3'-phosphate
  modified_base 9: mod_base = OTHER; note = 2'-fluorouridine-3'-phosphate
  modified_base 10: mod_base = OTHER; note = 2'-fluoroguanosine-3'-phosphate
  modified_base 11: mod_base = OTHER; note = 2'-fluorouridine-3'-phosphate
  modified_base 21: mod_base = OTHER; note = L96
  source 1..21: mol_type = other RNA
taaagcagtgttttcacctca

SEQ ID NO: 799 - RNA, 23 nt, synthetic construct
  modified_base 6: mod_base = OTHER; note = thymine
  misc_feature 1..23: note = Synthetic
  modified_base 1: mod_base = OTHER; note = 2'-O-methyluridine-3'- phosphorothioate
  modified_base 2: mod_base = OTHER; note = 2'-fluoroguanosine-3'-phosphorothioate
  modified_base 6: mod_base = OTHER; note = Thymidine-glycol nucleic acid
  modified_base 14: mod_base = OTHER; note = 2'-fluorocytidine-3'-phosphate
  modified_base 16: mod_base = OTHER; note = 2'-fluoroguanosine-3'-phosphate
  modified_base 21: mod_base = OTHER; note = 2'-O-methyladenosine-3'- phosphorothioate
  modified_base 22: mod_base = OTHER; note = 2'-O-methylguanosine-3'- phosphorothioate
  source 1..23: mol_type = other RNA
tgaggtgaaaacactgctttagt

SEQ ID NO: 800 - RNA, 23 nt, synthetic construct
  misc_feature 1..23: note = Synthetic
  source 1..23: mol_type = other RNA
actaaagcagtgttttcacctca

SEQ ID NO: 801 - RNA, 21 nt, synthetic construct
  misc_feature 1..21: note = Synthetic
  modified_base 1: mod_base = OTHER; note = 2'-O-methyladenosine-3'- phosphorothioate
  modified_base 2: mod_base = OTHER; note = 2'-O-methyladenosine-3'-phosphorothioate
  modified_base 7: mod_base = OTHER; note = 2'-fluoroguanosine-3'-phosphate
  modified_base 9: mod_base = OTHER; note = 2'-fluoroguanosine-3'-phosphate
  modified_base 10: mod_base = OTHER; note = 2'-fluorouridine-3'-phosphate
  modified_base 11: mod_base = OTHER; note = 2'-fluorouridine-3'-phosphate
  modified_base 21: mod_base = OTHER; note = L96
  source 1..21: mol_type = other RNA
aaagcagtgttttcacctcat

SEQ ID NO: 802 - RNA, 23 nt, synthetic construct
  modified_base 7: mod_base = OTHER; note = thymine
  misc_feature 1..23: note = Synthetic
  modified_base 1: mod_base = OTHER; note = 2'-O-methyladenosine-3'-phosphorothioate
  modified_base 2: mod_base = OTHER; note = 2'-fluorouridine -3'-phosphorothioate
  modified_base 6: mod_base = OTHER; note = 2'-fluoroguanosine-3'-phosphate
  modified_base 7: mod_base = OTHER; note = Thymidine-glycol nucleic acid
  modified_base 14: mod_base = OTHER; note = 2'-fluoroadenosine-3'-phosphate
  modified_base 16: mod_base = OTHER; note = 2'-fluorouridine-3'-phosphate
  modified_base 21: mod_base = OTHER; note = 2'-O-methyluridine-3'- phosphorothioate
  modified_base 22: mod_base = OTHER; note = 2'-O-methyladenosine-3'- phosphorothioate
  source 1..23: mol_type = other RNA
atgaggtgaaaacactgctttag

SEQ ID NO: 803 - RNA, 23 nt, synthetic construct
  misc_feature 1..23: note = Synthetic
  source 1..23: mol_type = other RNA
ctaaagcagtgttttcacctcat

SEQ ID NO: 804 - RNA, 21 nt, synthetic construct
  misc_feature 1..21: note = Synthetic
  modified_base 1: mod_base = OTHER; note = 2'-O-methyladenosine-3'- phosphorothioate
  modified_base 2: mod_base = OTHER; note = 2'-O-methyladenosine-3'-phosphorothioate
  modified_base 7: mod_base = OTHER; note = 2'-fluorouridine-3'-phosphate
  modified_base 9: mod_base = OTHER; note = 2'-fluorouridine-3'-phosphate
  modified_base 10: mod_base = OTHER; note = 2'-fluorouridine-3'-phosphate
  modified_base 11: mod_base = OTHER; note = 2'-fluorouridine-3'-phosphate
  modified_base 21: mod_base = OTHER; note = L96
  source 1..21: mol_type = other RNA
aagcagtgttttcacctcata

SEQ ID NO: 805 - RNA, 23 nt, synthetic construct
  modified_base 8: mod_base = OTHER; note = thymine
  misc_feature 1..23: note = Synthetic
  modified_base 1: mod_base = OTHER; note = 2'-O-methyluridine-3'-phosphorothioate
  modified_base 2: mod_base = OTHER; note = 2'-fluoroadenosine -3'-phosphorothioate
  modified_base 6: mod_base = OTHER; note = 2'-fluoroguanosine-3'-phosphate
  modified_base 8: mod_base = OTHER; note = Thymidine-glycol nucleic acid
  modified_base 14: mod_base = OTHER; note = 2'-fluorocytidine-3'-phosphate
  modified_base 16: mod_base = OTHER; note = 2'-fluorocytidine-3'-phosphate
  modified_base 21: mod_base = OTHER; note = 2'-O-methyluridine-3'- phosphorothioate
  modified_base 22: mod_base = OTHER; note = 2'-O-methyluridine-3'- phosphorothioate
  source 1..23: mol_type = other RNA
tatgaggtgaaaacactgcttta

SEQ ID NO: 806 - RNA, 23 nt, synthetic construct
  misc_feature 1..23: note = Synthetic
  source 1..23: mol_type = other RNA
taaagcagtgttttcacctcata

SEQ ID NO: 807 - RNA, 21 nt, synthetic construct
  misc_feature 1..21: note = Synthetic
  modified_base 1: mod_base = OTHER; note = 2'-O-methyladenosine-3'- phosphorothioate
  modified_base 2: mod_base = OTHER; note = 2'-O-methylguanosine-3'-phosphorothioate
  modified_base 7: mod_base = OTHER; note = 2'-fluoroguanosine-3'-phosphate
  modified_base 9: mod_base = OTHER; note = 2'-fluorouridine-3'-phosphate
  modified_base 10: mod_base = OTHER; note = 2'-fluorouridine-3'-phosphate
  modified_base 11: mod_base = OTHER; note = 2'-fluorouridine-3'-phosphate
  modified_base 21: mod_base = OTHER; note = L96
  source 1..21: mol_type = other RNA
agcagtgttttcacctcatat

SEQ ID NO: 808 - RNA, 23 nt, synthetic construct
  misc_feature 1..23: note = Synthetic
  modified_base 1: mod_base = OTHER; note = 2'-O-methyladenosine-3'-phosphorothioate
  modified_base 2: mod_base = OTHER; note = 2'-fluorouridine -3'-phosphorothioate
  modified_base 6: mod_base = OTHER; note = Adenosine-glycol nucleic acid
  modified_base 14: mod_base = OTHER; note = 2'-fluoroadenosine-3'-phosphate
  modified_base 16: mod_base = OTHER; note = 2'-fluoroadenosine-3'-phosphate
  modified_base 21: mod_base = OTHER; note = 2'-O-methyluridine-3'- phosphorothioate
  modified_base 22: mod_base = OTHER; note = 2'-O-methyluridine-3'- phosphorothioate
  source 1..23: mol_type = other RNA
atatgaggtgaaaacactgcttt

SEQ ID NO: 809 - RNA, 23 nt, synthetic construct
  misc_feature 1..23: note = Synthetic
  source 1..23: mol_type = other RNA
aaagcagtgttttcacctcatat

SEQ ID NO: 810 - RNA, 21 nt, synthetic construct
  misc_feature 1..21: note = Synthetic
  modified_base 1: mod_base = OTHER; note = 2'-O-methyladenosine-3'- phosphorothioate
  modified_base 2: mod_base = OTHER; note = 2'-O-methylguanosine-3'-phosphorothioate
  modified_base 7: mod_base = OTHER; note = 2'-fluorocytidine-3'-phosphate
  modified_base 9: mod_base = OTHER; note = 2'-fluoroadenosine-3'-phosphate
  modified_base 10: mod_base = OTHER; note = 2'-fluoroguanosine-3'-phosphate
  modified_base 11: mod_base = OTHER; note = 2'-fluoroguanosine-3'-phosphate
  modified_base 21: mod_base = OTHER; note = L96
  source 1..21: mol_type = other RNA
agaagtccaggcagagacaat

SEQ ID NO: 811 - RNA, 23 nt, synthetic construct
  modified_base 7: mod_base = OTHER; note = thymine
  misc_feature 1..23: note = Synthetic
  modified_base 1: mod_base = OTHER; note = 2'-O-methyladenosine-3'-phosphorothioate
  modified_base 2: mod_base = OTHER; note = 2'-fluorouridine -3'-phosphorothioate
  modified_base 6: mod_base = OTHER; note = 2'-fluorocytidine-3'-phosphate
  modified_base 7: mod_base = OTHER; note = Thymidine-glycol nucleic acid
  modified_base 14: mod_base = OTHER; note = 2'-fluoroguanosine-3'-phosphate
  modified_base 16: mod_base = OTHER; note = 2'-fluoroadenosine-3'-phosphate
  modified_base 21: mod_base = OTHER; note = 2'-O-methyluridine-3'- phosphorothioate
  modified_base 22: mod_base = OTHER; note = 2'-O-methyladenosine-3'- phosphorothioate
  source 1..23: mol_type = other RNA
attgtctctgcctggacttctaa

SEQ ID NO: 812 - RNA, 23 nt, synthetic construct
  misc_feature 1..23: note = Synthetic
  source 1..23: mol_type = other RNA
ttagaagtccaggcagagacaat

SEQ ID NO: 813 - RNA, 21 nt, synthetic construct
  misc_feature 1..21: note = Synthetic
  modified_base 1: mod_base = OTHER; note = 2'-O-methylguanosine-3'- phosphorothioate
  modified_base 2: mod_base = OTHER; note = 2'-O-methyladenosine-3'-phosphorothioate
  modified_base 7: mod_base = OTHER; note = 2'-fluorocytidine-3'-phosphate
  modified_base 9: mod_base = OTHER; note = 2'-fluoroguanosine-3'-phosphate
  modified_base 10: mod_base = OTHER; note = 2'-fluoroguanosine-3'-phosphate
  modified_base 11: mod_base = OTHER; note = 2'-fluorocytidine-3'-phosphate
  modified_base 21: mod_base = OTHER; note = L96
  source 1..21: mol_type = other RNA
gaagtccaggcagagacaata

SEQ ID NO: 814 - RNA, 23 nt, synthetic construct
  misc_feature 1..23: note = Synthetic
  modified_base 1: mod_base = OTHER; note = 2'-O-methyluridine-3'-phosphorothioate
  modified_base 2: mod_base = OTHER; note = 2'-fluoroadenosine -3'-phosphorothioate
  modified_base 6: mod_base = OTHER; note = 2'-fluorouridine-3'-phosphate
  modified_base 7: mod_base = OTHER; note = Cytidine-glycol nucleic acid
  modified_base 14: mod_base = OTHER; note = 2'-fluorouridine-3'-phosphate
  modified_base 16: mod_base = OTHER; note = 2'-fluoroguanosine-3'-phosphate
  modified_base 21: mod_base = OTHER; note = 2'-O-methylcytidine-3'- phosphorothioate
  modified_base 22: mod_base = OTHER; note = 2'-O-methyluridine-3'- phosphorothioate
  source 1..23: mol_type = other RNA
tattgtctctgcctggacttcta

SEQ ID NO: 815 - RNA, 23 nt, synthetic construct
  misc_feature 1..23: note = Synthetic
  source 1..23: mol_type = other RNA
tagaagtccaggcagagacaata

SEQ ID NO: 816 - RNA, 21 nt, synthetic construct
  misc_feature 1..21: note = Synthetic
  modified_base 1: mod_base = OTHER; note = 2'-O-methyladenosine-3'- phosphorothioate
  modified_base 2: mod_base = OTHER; note = 2'-O-methyladenosine-3'-phosphorothioate
  modified_base 7: mod_base = OTHER; note = 2'-fluoroadenosine-3'-phosphate
  modified_base 9: mod_base = OTHER; note = 2'-fluoroguanosine-3'-phosphate
  modified_base 10: mod_base = OTHER; note = 2'-fluorocytidine-3'-phosphate
  modified_base 11: mod_base = OTHER; note = 2'-fluoroadenosine-3'-phosphate
  modified_base 21: mod_base = OTHER; note = L96
  source 1..21: mol_type = other RNA
aagtccaggcagagacaataa

SEQ ID NO: 817 - RNA, 23 nt, synthetic construct
  modified_base 7: mod_base = OTHER; note = thymine
  misc_feature 1..23: note = Synthetic
  modified_base 1: mod_base = OTHER; note = 2'-O-methyluridine-3'- phosphorothioate
  modified_base 2: mod_base = OTHER; note = 2'-fluorouridine-3'-phosphorothioate
  modified_base 6: mod_base = OTHER; note = 2'-fluoroguanosine-3'-phosphate
  modified_base 7: mod_base = OTHER; note = Thymidine-glycol nucleic acid
  modified_base 14: mod_base = OTHER; note = 2'-fluorocytidine-3'-phosphate
  modified_base 16: mod_base = OTHER; note = 2'-fluoroguanosine-3'-phosphate
  modified_base 21: mod_base = OTHER; note = 2'-O-methyluridine-3'- phosphorothioate
  modified_base 22: mod_base = OTHER; note = 2'-O-methylcytidine-3'- phosphorothioate
  source 1..23: mol_type = other RNA
ttattgtctctgcctggacttct

SEQ ID NO: 818 - RNA, 23 nt, synthetic construct
  misc_feature 1..23: note = Synthetic
  source 1..23: mol_type = other RNA
agaagtccaggcagagacaataa

SEQ ID NO: 819 - RNA, 21 nt, synthetic construct
  misc_feature 1..21: note = Synthetic
  modified_base 1: mod_base = OTHER; note = 2'-O-methyladenosine-3'- phosphorothioate
  modified_base 2: mod_base = OTHER; note = 2'-O-methylguanosine-3'-phosphorothioate
  modified_base 7: mod_base = OTHER; note = 2'-fluoroguanosine-3'-phosphate
  modified_base 9: mod_base = OTHER; note = 2'-fluorocytidine-3'-phosphate
  modified_base 10: mod_base = OTHER; note = 2'-fluoroadenosine-3'-phosphate
  modified_base 11: mod_base = OTHER; note = 2'-fluoroguanosine-3'-phosphate
  modified_base 21: mod_base = OTHER; note = L96
  source 1..21: mol_type = other RNA
agtccaggcagagacaataaa

SEQ ID NO: 820 - RNA, 23 nt, synthetic construct
  modified_base 6: mod_base = OTHER; note = thymine
  misc_feature 1..23: note = Synthetic
  modified_base 1: mod_base = OTHER; note = 2'-O-methyluridine-3'- phosphorothioate
  modified_base 2: mod_base = OTHER; note = 2'-fluorouridine-3'-phosphorothioate
  modified_base 6: mod_base = OTHER; note = Thymidine-glycol nucleic acid
  modified_base 14: mod_base = OTHER; note = 2'-fluorocytidine-3'-phosphate
  modified_base 16: mod_base = OTHER; note = 2'-fluorouridine-3'-phosphate
  modified_base 21: mod_base = OTHER; note = 2'-O-methyluridine-3'-phosphorothioate
  modified_base 22: mod_base = OTHER; note = 2'-O-methyluridine-3'- phosphorothioate
  source 1..23: mol_type = other RNA
tttattgtctctgcctggacttc

SEQ ID NO: 821 - RNA, 23 nt, synthetic construct
  misc_feature 1..23: note = Synthetic
  source 1..23: mol_type = other RNA
gaagtccaggcagagacaataaa

SEQ ID NO: 822 - RNA, 21 nt, synthetic construct
  misc_feature 1..21: note = Synthetic
  modified_base 1: mod_base = OTHER; note = 2'-O-methylguanosine-3'- phosphorothioate
  modified_base 2: mod_base = OTHER; note = 2'-O-methyluridine-3'-phosphorothioate
  modified_base 7: mod_base = OTHER; note = 2'-fluoroguanosine-3'-phosphate
  modified_base 9: mod_base = OTHER; note = 2'-fluoroadenosine-3'-phosphate
  modified_base 10: mod_base = OTHER; note = 2'-fluoroguanosine-3'-phosphate
  modified_base 11: mod_base = OTHER; note = 2'-fluoroadenosine-3'-phosphate
  modified_base 21: mod_base = OTHER; note = L96
  source 1..21: mol_type = other RNA
gtccaggcagagacaataaaa

SEQ ID NO: 823 - RNA, 23 nt, synthetic construct
  modified_base 7: mod_base = OTHER; note = thymine
  misc_feature 1..23: note = Synthetic
  modified_base 1: mod_base = OTHER; note = 2'-O-methyluridine-3'- phosphorothioate
  modified_base 2: mod_base = OTHER; note = 2'-fluorouridine-3'-phosphorothioate
  modified_base 6: mod_base = OTHER; note = 2'-fluorouridine-3'-phosphate
  modified_base 7: mod_base = OTHER; note = Thymidine-glycol nucleic acid
  modified_base 14: mod_base = OTHER; note = 2'-fluoroguanosine-3'-phosphate
  modified_base 16: mod_base = OTHER; note = 2'-fluorocytidine-3'-phosphate
  modified_base 21: mod_base = OTHER; note = 2'-O-methylcytidine-3'-phosphorothioate
  modified_base 22: mod_base = OTHER; note = 2'-O-methyluridine-3'- phosphorothioate
  source 1..23: mol_type = other RNA
ttttattgtctctgcctggactt

SEQ ID NO: 824 - RNA, 23 nt, synthetic construct
  misc_feature 1..23: note = Synthetic
  source 1..23: mol_type = other RNA
aagtccaggcagagacaataaaa

SEQ ID NO: 825 - RNA, 21 nt, synthetic construct
  misc_feature 1..21: note = Synthetic
  modified_base 1: mod_base = OTHER; note = 2'-O-methyluridine-3'- phosphorothioate
  modified_base 2: mod_base = OTHER; note = 2'-O-methylcytidine-3'-phosphorothioate
  modified_base 7: mod_base = OTHER; note = 2'-fluorocytidine-3'-phosphate
  modified_base 9: mod_base = OTHER; note = 2'-fluoroguanosine-3'-phosphate
  modified_base 10: mod_base = OTHER; note = 2'-fluoroadenosine-3'-phosphate
  modified_base 11: mod_base = OTHER; note = 2'-fluoroguanosine-3'-phosphate
  modified_base 21: mod_base = OTHER; note = L96
  source 1..21: mol_type = other RNA
tccaggcagagacaataaaat

SEQ ID NO: 826 - RNA, 23 nt, synthetic construct
  modified_base 7: mod_base = OTHER; note = thymine
  misc_feature 1..23: note = Synthetic
  modified_base 1: mod_base = OTHER; note = 2'-O-methyladenosine-3'-phosphorothioate
  modified_base 2: mod_base = OTHER; note = 2'-fluorouridine -3'-phosphorothioate
  modified_base 6: mod_base = OTHER; note = 2'-fluoroadenosine-3'-phosphate
  modified_base 7: mod_base = OTHER; note = Thymidine-glycol nucleic acid
  modified_base 14: mod_base = OTHER; note = 2'-fluorouridine-3'-phosphate
  modified_base 16: mod_base = OTHER; note = 2'-fluorocytidine-3'-phosphate
  modified_base 21: mod_base = OTHER; note = 2'-O-methyladenosine-3'- phosphorothioate
  modified_base 22: mod_base = OTHER; note = 2'-O-methylcytidine-3'- phosphorothioate
  source 1..23: mol_type = other RNA
attttattgtctctgcctggact

SEQ ID NO: 827 - RNA, 23 nt, synthetic construct
  misc_feature 1..23: note = Synthetic
  source 1..23: mol_type = other RNA
agtccaggcagagacaataaaac

SEQ ID NO: 828 - RNA, 21 nt, synthetic construct
  misc_feature 1..21: note = Synthetic
  modified_base 1: mod_base = OTHER; note = 2'-O-methylcytidine-3'- phosphorothioate
  modified_base 2: mod_base = OTHER; note = 2'-O-methylcytidine-3'-phosphorothioate
  modified_base 7: mod_base = OTHER; note = 2'-fluoroadenosine-3'-phosphate
  modified_base 9: mod_base = OTHER; note = 2'-fluoroadenosine-3'-phosphate
  modified_base 10: mod_base = OTHER; note = 2'-fluoroguanosine-3'-phosphate
  modified_base 11: mod_base = OTHER; note = 2'-fluoroadenosine-3'-phosphate
  modified_base 21: mod_base = OTHER; note = L96
  source 1..21: mol_type = other RNA
ccaggcagagacaataaaaca

SEQ ID NO: 829 - RNA, 23 nt, synthetic construct
  misc_feature 1..23: note = Synthetic
  modified_base 1: mod_base = OTHER; note = 2'-O-methyluridine-3'- phosphorothioate
  modified_base 2: mod_base = OTHER; note = 2'-fluoroguanosine-3'-phosphorothioate
  modified_base 6: mod_base = OTHER; note = 2'-fluorouridine-3'-phosphate
  modified_base 7: mod_base = OTHER; note = Adenosine-glycol nucleic acid
  modified_base 14: mod_base = OTHER; note = 2'-fluorocytidine-3'-phosphate
  modified_base 16: mod_base = OTHER; note = 2'-fluoroguanosine-3'-phosphate
  modified_base 21: mod_base = OTHER; note = 2'-O-methylguanosine-3'- phosphorothioate
  modified_base 22: mod_base = OTHER; note = 2'-O-methyladenosine-3'- phosphorothioate
  source 1..23: mol_type = other RNA
tgttttattgtctctgcctggac

SEQ ID NO: 830 - RNA, 23 nt, synthetic construct
  misc_feature 1..23: note = Synthetic
  source 1..23: mol_type = other RNA
gtccaggcagagacaataaaaca

SEQ ID NO: 831 - RNA, 21 nt, synthetic construct
  misc_feature 1..21: note = Synthetic
  modified_base 1: mod_base = OTHER; note = 2'-O-methylcytidine-3'- phosphorothioate
  modified_base 2: mod_base = OTHER; note = 2'-O-methyladenosine-3'-phosphorothioate
  modified_base 7: mod_base = OTHER; note = 2'-fluoroguanosine-3'-phosphate
  modified_base 9: mod_base = OTHER; note = 2'-fluoroguanosine-3'-phosphate
  modified_base 10: mod_base = OTHER; note = 2'-fluoroadenosine-3'-phosphate
  modified_base 11: mod_base = OTHER; note = 2'-fluorocytidine-3'-phosphate
  modified_base 21: mod_base = OTHER; note = L96
  source 1..21: mol_type = other RNA
caggcagagacaataaaacat

SEQ ID NO: 832 - RNA, 23 nt, synthetic construct
  modified_base 7: mod_base = OTHER; note = thymine
  misc_feature 1..23: note = Synthetic
  modified_base 1: mod_base = OTHER; note = 2'-O-methyladenosine-3'-phosphorothioate
  modified_base 2: mod_base = OTHER; note = 2'-fluorouridine -3'-phosphorothioate
  modified_base 6: mod_base = OTHER; note = 2'-fluorouridine-3'-phosphate
  modified_base 7: mod_base = OTHER; note = Thymidine-glycol nucleic acid
  modified_base 14: mod_base = OTHER; note = 2'-fluorouridine-3'-phosphate
  modified_base 16: mod_base = OTHER; note = 2'-fluorouridine-3'-phosphate
  modified_base 21: mod_base = OTHER; note = 2'-O-methylguanosine-3'- phosphorothioate
  modified_base 22: mod_base = OTHER; note = 2'-O-methylguanosine-3'- phosphorothioate
  source 1..23: mol_type = other RNA
atgttttattgtctctgcctgga

SEQ ID NO: 833 - RNA, 23 nt, synthetic construct
  misc_feature 1..23: note = Synthetic
  source 1..23: mol_type = other RNA
tccaggcagagacaataaaacat

SEQ ID NO: 834 - RNA, 21 nt, synthetic construct
  misc_feature 1..21: note = Synthetic
  modified_base 1: mod_base = OTHER; note = 2'-O-methyladenosine-3'- phosphorothioate
  modified_base 2: mod_base = OTHER; note = 2'-O-methylguanosine-3'-phosphorothioate
  modified_base 7: mod_base = OTHER; note = 2'-fluoroadenosine-3'-phosphate
  modified_base 9: mod_base = OTHER; note = 2'-fluoroadenosine-3'-phosphate
  modified_base 10: mod_base = OTHER; note = 2'-fluorocytidine-3'-phosphate
  modified_base 11: mod_base = OTHER; note = 2'-fluoroadenosine-3'-phosphate
  modified_base 21: mod_base = OTHER; note = L96
  source 1..21: mol_type = other RNA
aggcagagacaataaaacatt

SEQ ID NO: 835 - RNA, 23 nt, synthetic construct
  modified_base 7: mod_base = OTHER; note = thymine
  misc_feature 1..23: note = Synthetic
  modified_base 1: mod_base = OTHER; note = 2'-O-methyladenosine-3'- phosphorothioate
  modified_base 2: mod_base = OTHER; note = 2'-fluoroadenosine-3'-phosphorothioate
  modified_base 6: mod_base = OTHER; note = 2'-fluorouridine-3'-phosphate
  modified_base 7: mod_base = OTHER; note = Thymidine-glycol nucleic acid
  modified_base 14: mod_base = OTHER; note = 2'-fluorocytidine-3'-phosphate
  modified_base 16: mod_base = OTHER; note = 2'-fluorocytidine-3'-phosphate
  modified_base 21: mod_base = OTHER; note = 2'-O-methyluridine-3'- phosphorothioate
  modified_base 22: mod_base = OTHER; note = 2'-O-methylguanosine-3'- phosphorothioate
  source 1..23: mol_type = other RNA
aatgttttattgtctctgcctgg

SEQ ID NO: 836 - RNA, 23 nt, synthetic construct
  misc_feature 1..23: note = Synthetic
  source 1..23: mol_type = other RNA
ccaggcagagacaataaaacatt

SEQ ID NO: 837 - RNA, 21 nt, synthetic construct
  misc_feature 1..21: note = Synthetic
  modified_base 1: mod_base = OTHER; note = 2'-O-methylguanosine-3'- phosphorothioate
  modified_base 2: mod_base = OTHER; note = 2'-O-methylguanosine-3'-phosphorothioate
  modified_base 7: mod_base = OTHER; note = 2'-fluoroguanosine-3'-phosphate
  modified_base 9: mod_base = OTHER; note = 2'-fluorocytidine-3'-phosphate
  modified_base 10: mod_base = OTHER; note = 2'-fluoroadenosine-3'-phosphate
  modified_base 11: mod_base = OTHER; note = 2'-fluoroadenosine-3'-phosphate
  modified_base 21: mod_base = OTHER; note = L96
  source 1..21: mol_type = other RNA
ggcagagacaataaaacattt

SEQ ID NO: 838 - RNA, 23 nt, synthetic construct
  modified_base 7: mod_base = OTHER; note = thymine
  misc_feature 1..23: note = Synthetic
  modified_base 1: mod_base = OTHER; note = 2'-O-methyladenosine-3'- phosphorothioate
  modified_base 2: mod_base = OTHER; note = 2'-fluoroadenosine-3'-phosphorothioate
  modified_base 6: mod_base = OTHER; note = 2'-fluorouridine-3'-phosphate
  modified_base 7: mod_base = OTHER; note = Thymidine-glycol nucleic acid
  modified_base 14: mod_base = OTHER; note = 2'-fluorouridine-3'-phosphate
  modified_base 16: mod_base = OTHER; note = 2'-fluorouridine-3'-phosphate
  modified_base 21: mod_base = OTHER; note = 2'-O-methylcytidine-3'- phosphorothioate
  modified_base 22: mod_base = OTHER; note = 2'-O-methyluridine-3'- phosphorothioate
  source 1..23: mol_type = other RNA
aaatgttttattgtctctgcctg

SEQ ID NO: 839 - RNA, 23 nt, synthetic construct
  misc_feature 1..23: note = Synthetic
  source 1..23: mol_type = other RNA
caggcagagacaataaaacattc

SEQ ID NO: 840 - RNA, 21 nt, synthetic construct
  misc_feature 1..21: note = Synthetic
  modified_base 1: mod_base = OTHER; note = 2'-O-methylguanosine-3'- phosphorothioate
  modified_base 2: mod_base = OTHER; note = 2'-O-methylcytidine-3'-phosphorothioate
  modified_base 7: mod_base = OTHER; note = 2'-fluoroadenosine-3'-phosphate
  modified_base 9: mod_base = OTHER; note = 2'-fluoroadenosine-3'-phosphate
  modified_base 10: mod_base = OTHER; note = 2'-fluoroadenosine-3'-phosphate
  modified_base 11: mod_base = OTHER; note = 2'-fluorouridine-3'-phosphate
  modified_base 21: mod_base = OTHER; note = L96
  source 1..21: mol_type = other RNA
gcagagacaataaaacattct

SEQ ID NO: 841 - RNA, 23 nt, synthetic construct
  modified_base 7: mod_base = OTHER; note = thymine
  misc_feature 1..23: note = Synthetic
  modified_base 1: mod_base = OTHER; note = 2'-O-methyladenosine-3'-phosphorothioate
  modified_base 2: mod_base = OTHER; note = 2'-fluoroguanosine -3'-phosphorothioate
  modified_base 6: mod_base = OTHER; note = 2'-fluoroguanosine-3'-phosphate
  modified_base 7: mod_base = OTHER; note = Thymidine-glycol nucleic acid
  modified_base 14: mod_base = OTHER; note = 2'-fluoroguanosine-3'-phosphate
  modified_base 16: mod_base = OTHER; note = 2'-fluorocytidine-3'-phosphate
  modified_base 21: mod_base = OTHER; note = 2'-O-methylcytidine-3'- phosphorothioate
  modified_base 22: mod_base = OTHER; note = 2'-O-methylcytidine-3'- phosphorothioate
  source 1..23: mol_type = other RNA
agaatgttttattgtctctgcct

SEQ ID NO: 842 - RNA, 23 nt, synthetic construct
  misc_feature 1..23: note = Synthetic
  source 1..23: mol_type = other RNA
aggcagagacaataaaacattcc

SEQ ID NO: 843 - RNA, 21 nt, synthetic construct
  misc_feature 1..21: note = Synthetic
  modified_base 1: mod_base = OTHER; note = 2'-O-methyladenosine-3'- phosphorothioate
  modified_base 2: mod_base = OTHER; note = 2'-O-methylguanosine-3'-phosphorothioate
  modified_base 7: mod_base = OTHER; note = 2'-fluoroadenosine-3'-phosphate
  modified_base 9: mod_base = OTHER; note = 2'-fluorouridine-3'-phosphate
  modified_base 10: mod_base = OTHER; note = 2'-fluoroadenosine-3'-phosphate
  modified_base 11: mod_base = OTHER; note = 2'-fluoroadenosine-3'-phosphate
  modified_base 21: mod_base = OTHER; note = L96
  source 1..21: mol_type = other RNA
agagacaataaaacattcctt

SEQ ID NO: 844 - RNA, 23 nt, synthetic construct
  modified_base 7: mod_base = OTHER; note = thymine
  misc_feature 1..23: note = Synthetic
  modified_base 1: mod_base = OTHER; note = 2'-O-methyladenosine-3'- phosphorothioate
  modified_base 2: mod_base = OTHER; note = 2'-fluoroadenosine-3'-phosphorothioate
  modified_base 6: mod_base = OTHER; note = 2'-fluoroadenosine-3'-phosphate
  modified_base 7: mod_base = OTHER; note = Thymidine-glycol nucleic acid
  modified_base 14: mod_base = OTHER; note = 2'-fluorouridine-3'-phosphate
  modified_base 16: mod_base = OTHER; note = 2'-fluoroguanosine-3'-phosphate
  modified_base 21: mod_base = OTHER; note = 2'-O-methyluridine-3'- phosphorothioate
  modified_base 22: mod_base = OTHER; note = 2'-O-methylguanosine-3'- phosphorothioate
  source 1..23: mol_type = other RNA
aaggaatgttttattgtctctgc

SEQ ID NO: 845 - RNA, 23 nt, synthetic construct
  misc_feature 1..23: note = Synthetic
  source 1..23: mol_type = other RNA
gcagagacaataaaacattcctg

SEQ ID NO: 846 - RNA, 21 nt, synthetic construct
  misc_feature 1..21: note = Synthetic
  modified_base 1: mod_base = OTHER; note = 2'-O-methylguanosine-3'- phosphorothioate
  modified_base 2: mod_base = OTHER; note = 2'-O-methyladenosine-3'-phosphorothioate
  modified_base 7: mod_base = OTHER; note = 2'-fluoroadenosine-3'-phosphate
  modified_base 9: mod_base = OTHER; note = 2'-fluoroadenosine-3'-phosphate
  modified_base 10: mod_base = OTHER; note = 2'-fluoroadenosine-3'-phosphate
  modified_base 11: mod_base = OTHER; note = 2'-fluoroadenosine-3'-phosphate
  modified_base 21: mod_base = OTHER; note = L96
  source 1..21: mol_type = other RNA
gagacaataaaacattcctgt

SEQ ID NO: 847 - RNA, 23 nt, synthetic construct
  misc_feature 1..23: note = Synthetic
  modified_base 1: mod_base = OTHER; note = 2'-O-methyladenosine-3'- phosphorothioate
  modified_base 2: mod_base = OTHER; note = 2'-fluorocytidine-3'-phosphorothioate
  modified_base 6: mod_base = OTHER; note = 2'-fluoroadenosine-3'-phosphate
  modified_base 7: mod_base = OTHER; note = Adenosine-glycol nucleic acid
  modified_base 14: mod_base = OTHER; note = 2'-fluoroadenosine-3'-phosphate
  modified_base 16: mod_base = OTHER; note = 2'-fluorouridine-3'-phosphate
  modified_base 21: mod_base = OTHER; note = 2'-O-methylcytidine-3'- phosphorothioate
  modified_base 22: mod_base = OTHER; note = 2'-O-methyluridine-3'- phosphorothioate
  source 1..23: mol_type = other RNA
acaggaatgttttattgtctctg

SEQ ID NO: 848 - RNA, 23 nt, synthetic construct
  misc_feature 1..23: note = Synthetic
  source 1..23: mol_type = other RNA
cagagacaataaaacattcctgt

SEQ ID NO: 849 - RNA, 21 nt, synthetic construct
  misc_feature 1..21: note = Synthetic
  modified_base 1: mod_base = OTHER; note = 2'-O-methylguanosine-3'- phosphorothioate
  modified_base 2: mod_base = OTHER; note = 2'-O-methyladenosine-3'-phosphorothioate
  modified_base 7: mod_base = OTHER; note = 2'-fluoroadenosine-3'-phosphate
  modified_base 9: mod_base = OTHER; note = 2'-fluoroadenosine-3'-phosphate
  modified_base 10: mod_base = OTHER; note = 2'-fluoroadenosine-3'-phosphate
  modified_base 11: mod_base = OTHER; note = 2'-fluorocytidine-3'-phosphate
  modified_base 21: mod_base = OTHER; note = L96
  source 1..21: mol_type = other RNA
gacaataaaacattcctgtga

SEQ ID NO: 850 - RNA, 23 nt, synthetic construct
  misc_feature 1..23: note = Synthetic
  modified_base 1: mod_base = OTHER; note = 2'-O-methyluridine-3'- phosphorothioate
  modified_base 2: mod_base = OTHER; note = 2'-fluorocytidine-3'-phosphorothioate
  modified_base 6: mod_base = OTHER; note = 2'-fluoroguanosine-3'-phosphate
  modified_base 7: mod_base = OTHER; note = Adenosine-glycol nucleic acid
  modified_base 14: mod_base = OTHER; note = 2'-fluorouridine-3'-phosphate
  modified_base 16: mod_base = OTHER; note = 2'-fluoroadenosine-3'-phosphate
  modified_base 21: mod_base = OTHER; note = 2'-O-methylcytidine-3'- phosphorothioate
  modified_base 22: mod_base = OTHER; note = 2'-O-methyluridine-3'- phosphorothioate
  source 1..23: mol_type = other RNA
tcacaggaatgttttattgtctc

SEQ ID NO: 851 - RNA, 23 nt, synthetic construct
  misc_feature 1..23: note = Synthetic
  source 1..23: mol_type = other RNA
gagacaataaaacattcctgtga

SEQ ID NO: 852 - RNA, 21 nt, synthetic construct
  misc_feature 1..21: note = Synthetic
  modified_base 1: mod_base = OTHER; note = 2'-O-methyladenosine-3'- phosphorothioate
  modified_base 2: mod_base = OTHER; note = 2'-O-methylcytidine-3'-phosphorothioate
  modified_base 7: mod_base = OTHER; note = 2'-fluoroadenosine-3'-phosphate
  modified_base 9: mod_base = OTHER; note = 2'-fluoroadenosine-3'-phosphate
  modified_base 10: mod_base = OTHER; note = 2'-fluorocytidine-3'-phosphate
  modified_base 11: mod_base = OTHER; note = 2'-fluoroadenosine-3'-phosphate
  modified_base 21: mod_base = OTHER; note = L96
  source 1..21: mol_type = other RNA
acaataaaacattcctgtgaa

SEQ ID NO: 853 - RNA, 23 nt, synthetic construct
  misc_feature 1..23: note = Synthetic
  modified_base 1: mod_base = OTHER; note = 2'-O-methyluridine-3'- phosphorothioate
  modified_base 2: mod_base = OTHER; note = 2'-fluorouridine-3'-phosphorothioate
  modified_base 6: mod_base = OTHER; note = Adenosine-glycol nucleic acid
  modified_base 14: mod_base = OTHER; note = 2'-fluorouridine-3'-phosphate
  modified_base 16: mod_base = OTHER; note = 2'-fluorouridine-3'-phosphate
  modified_base 21: mod_base = OTHER; note = 2'-O-methyluridine-3'- phosphorothioate
  modified_base 22: mod_base = OTHER; note = 2'-O-methylcytidine-3'- phosphorothioate
  source 1..23: mol_type = other RNA
ttcacaggaatgttttattgtct

SEQ ID NO: 854 - RNA, 23 nt, synthetic construct
  misc_feature 1..23: note = Synthetic
  source 1..23: mol_type = other RNA
agacaataaaacattcctgtgaa

SEQ ID NO: 855 - RNA, 21 nt, synthetic construct
  misc_feature 1..21: note = Synthetic
  modified_base 1: mod_base = OTHER; note = 2'-O-methylcytidine-3'- phosphorothioate
  modified_base 2: mod_base = OTHER; note = 2'-O-methyladenosine-3'-phosphorothioate
  modified_base 7: mod_base = OTHER; note = 2'-fluoroadenosine-3'-phosphate
  modified_base 9: mod_base = OTHER; note = 2'-fluorocytidine-3'-phosphate
  modified_base 10: mod_base = OTHER; note = 2'-fluoroadenosine-3'-phosphate
  modified_base 11: mod_base = OTHER; note = 2'-fluorouridine-3'-phosphate
  modified_base 21: mod_base = OTHER; note = L96
  source 1..21: mol_type = other RNA
caataaaacattcctgtgaaa

SEQ ID NO: 856 - RNA, 23 nt, synthetic construct
  misc_feature 1..23: note = Synthetic
  modified_base 1: mod_base = OTHER; note = 2'-O-methyluridine-3'- phosphorothioate
  modified_base 2: mod_base = OTHER; note = 2'-fluorouridine-3'-phosphorothioate
  modified_base 6: mod_base = OTHER; note = 2'-fluorocytidine-3'-phosphate
  modified_base 7: mod_base = OTHER; note = Adenosine-glycol nucleic acid
  modified_base 14: mod_base = OTHER; note = 2'-fluorouridine-3'-phosphate
  modified_base 16: mod_base = OTHER; note = 2'-fluorouridine-3'-phosphate
  modified_base 21: mod_base = OTHER; note = 2'-O-methylguanosine-3'- phosphorothioate
  modified_base 22: mod_base = OTHER; note = 2'-O-methyluridine-3'- phosphorothioate
  source 1..23: mol_type = other RNA
tttcacaggaatgttttattgtc

SEQ ID NO: 857 - RNA, 23 nt, synthetic construct
  misc_feature 1..23: note = Synthetic
  source 1..23: mol_type = other RNA
gacaataaaacattcctgtgaaa

SEQ ID NO: 858 - RNA, 21 nt, synthetic construct
  misc_feature 1..21: note = Synthetic
  modified_base 1: mod_base = OTHER; note = 2'-O-methyladenosine-3'- phosphorothioate
  modified_base 2: mod_base = OTHER; note = 2'-O-methyladenosine-3'-phosphorothioate
  modified_base 7: mod_base = OTHER; note = 2'-fluoroadenosine-3'-phosphate
  modified_base 9: mod_base = OTHER; note = 2'-fluoroadenosine-3'-phosphate
  modified_base 10: mod_base = OTHER; note = 2'-fluorouridine-3'-phosphate
  modified_base 11: mod_base = OTHER; note = 2'-fluorouridine-3'-phosphate
  modified_base 21: mod_base = OTHER; note = L96
  source 1..21: mol_type = other RNA
aataaaacattcctgtgaaat

SEQ ID NO: 859 - RNA, 23 nt, synthetic construct
  misc_feature 1..23: note = Synthetic
  modified_base 1: mod_base = OTHER; note = 2'-O-methyladenosine-3'-phosphorothioate
  modified_base 2: mod_base = OTHER; note = 2'-fluorouridine -3'-phosphorothioate
  modified_base 6: mod_base = OTHER; note = 2'-fluoroadenosine-3'-phosphate
  modified_base 7: mod_base = OTHER; note = Cytidine-glycol nucleic acid
  modified_base 14: mod_base = OTHER; note = 2'-fluoroguanosine-3'-phosphate
  modified_base 16: mod_base = OTHER; note = 2'-fluorouridine-3'-phosphate
  modified_base 21: mod_base = OTHER; note = 2'-O-methyluridine-3'- phosphorothioate
  modified_base 22: mod_base = OTHER; note = 2'-O-methylguanosine-3'- phosphorothioate
  source 1..23: mol_type = other RNA
atttcacaggaatgttttattgt

SEQ ID NO: 860 - RNA, 23 nt, synthetic construct
  misc_feature 1..23: note = Synthetic
  source 1..23: mol_type = other RNA
acaataaaacattcctgtgaaag

SEQ ID NO: 861 - RNA, 21 nt, synthetic construct
  misc_feature 1..21: note = Synthetic
  modified_base 1: mod_base = OTHER; note = 2'-O-methyladenosine-3'- phosphorothioate
  modified_base 2: mod_base = OTHER; note = 2'-O-methyluridine-3'-phosphorothioate
  modified_base 7: mod_base = OTHER; note = 2'-fluorocytidine-3'-phosphate
  modified_base 9: mod_base = OTHER; note = 2'-fluorouridine-3'-phosphate
  modified_base 10: mod_base = OTHER; note = 2'-fluorouridine-3'-phosphate
  modified_base 11: mod_base = OTHER; note = 2'-fluorocytidine-3'-phosphate
  modified_base 21: mod_base = OTHER; note = L96
  source 1..21: mol_type = other RNA
ataaaacattcctgtgaaagt

SEQ ID NO: 862 - RNA, 23 nt, synthetic construct
  misc_feature 1..23: note = Synthetic
  modified_base 1: mod_base = OTHER; note = 2'-O-methyladenosine-3'- phosphorothioate
  modified_base 2: mod_base = OTHER; note = 2'-fluorocytidine-3'-phosphorothioate
  modified_base 6: mod_base = OTHER; note = 2'-fluorocytidine-3'-phosphate
  modified_base 7: mod_base = OTHER; note = Adenosine-glycol nucleic acid
  modified_base 14: mod_base = OTHER; note = 2'-fluorouridine-3'-phosphate
  modified_base 16: mod_base = OTHER; note = 2'-fluorouridine-3'-phosphate
  modified_base 21: mod_base = OTHER; note = 2'-O-methyluridine-3'- phosphorothioate
  modified_base 22: mod_base = OTHER; note = 2'-O-methyluridine-3'- phosphorothioate
  source 1..23: mol_type = other RNA
actttcacaggaatgttttattg

SEQ ID NO: 863 - RNA, 23 nt, synthetic construct
  misc_feature 1..23: note = Synthetic
  source 1..23: mol_type = other RNA
caataaaacattcctgtgaaagg

SEQ ID NO: 864 - RNA, 21 nt, synthetic construct
  misc_feature 1..21: note = Synthetic
  modified_base 1: mod_base = OTHER; note = 2'-O-methyladenosine-3'- phosphorothioate
  modified_base 2: mod_base = OTHER; note = 2'-O-methyladenosine-3'-phosphorothioate
  modified_base 7: mod_base = OTHER; note = 2'-fluorouridine-3'-phosphate
  modified_base 9: mod_base = OTHER; note = 2'-fluorocytidine-3'-phosphate
  modified_base 10: mod_base = OTHER; note = 2'-fluorocytidine-3'-phosphate
  modified_base 11: mod_base = OTHER; note = 2'-fluorouridine-3'-phosphate
  modified_base 21: mod_base = OTHER; note = L96
  source 1..21: mol_type = other RNA
aaaacattcctgtgaaaggca

SEQ ID NO: 865 - RNA, 23 nt, synthetic construct
  modified_base 7: mod_base = OTHER; note = thymine
  misc_feature 1..23: note = Synthetic
  modified_base 1: mod_base = OTHER; note = 2'-O-methyluridine-3'- phosphorothioate
  modified_base 2: mod_base = OTHER; note = 2'-fluoroguanosine-3'-phosphorothioate
  modified_base 6: mod_base = OTHER; note = 2'-fluorouridine-3'-phosphate
  modified_base 7: mod_base = OTHER; note = Thymidine-glycol nucleic acid
  modified_base 14: mod_base = OTHER; note = 2'-fluoroadenosine-3'-phosphate
  modified_base 16: mod_base = OTHER; note = 2'-fluorouridine-3'-phosphate
  modified_base 21: mod_base = OTHER; note = 2'-O-methyluridine-3'- phosphorothioate
  modified_base 22: mod_base = OTHER; note = 2'-O-methyladenosine-3'- phosphorothioate
  source 1..23: mol_type = other RNA
tgcctttcacaggaatgttttat

SEQ ID NO: 866 - RNA, 23 nt, synthetic construct
  misc_feature 1..23: note = Synthetic
  source 1..23: mol_type = other RNA
ataaaacattcctgtgaaaggca

SEQ ID NO: 867 - RNA, 21 nt, synthetic construct
  misc_feature 1..21: note = Synthetic
  modified_base 1: mod_base = OTHER; note = 2'-O-methyladenosine-3'- phosphorothioate
  modified_base 2: mod_base = OTHER; note = 2'-O-methyladenosine-3'-phosphorothioate
  modified_base 7: mod_base = OTHER; note = 2'-fluorouridine-3'-phosphate
  modified_base 9: mod_base = OTHER; note = 2'-fluorocytidine-3'-phosphate
  modified_base 10: mod_base = OTHER; note = 2'-fluorouridine-3'-phosphate
  modified_base 11: mod_base = OTHER; note = 2'-fluoroguanosine-3'-phosphate
  modified_base 21: mod_base = OTHER; note = L96
  source 1..21: mol_type = other RNA
aaacattcctgtgaaaggcat

SEQ ID NO: 868 - RNA, 23 nt, synthetic construct
  modified_base 7: mod_base = OTHER; note = thymine
  misc_feature 1..23: note = Synthetic
  modified_base 1: mod_base = OTHER; note = 2'-O-methyladenosine-3'-phosphorothioate
  modified_base 2: mod_base = OTHER; note = 2'-fluorouridine -3'-phosphorothioate
  modified_base 6: mod_base = OTHER; note = 2'-fluorouridine-3'-phosphate
  modified_base 7: mod_base = OTHER; note = Thymidine-glycol nucleic acid
  modified_base 14: mod_base = OTHER; note = 2'-fluoroguanosine-3'-phosphate
  modified_base 16: mod_base = OTHER; note = 2'-fluoroadenosine-3'-phosphate
  modified_base 21: mod_base = OTHER; note = 2'-O-methyluridine-3'- phosphorothioate
  modified_base 22: mod_base = OTHER; note = 2'-O-methyluridine-3'- phosphorothioate
  source 1..23: mol_type = other RNA
atgcctttcacaggaatgtttta

SEQ ID NO: 869 - RNA, 23 nt, synthetic construct
  misc_feature 1..23: note = Synthetic
  source 1..23: mol_type = other RNA
taaaacattcctgtgaaaggcac

SEQ ID NO: 870 - RNA, 21 nt, synthetic construct
  misc_feature 1..21: note = Synthetic
  modified_base 1: mod_base = OTHER; note = 2'-O-methyladenosine-3'- phosphorothioate
  modified_base 2: mod_base = OTHER; note = 2'-O-methyladenosine-3'-phosphorothioate
  modified_base 7: mod_base = OTHER; note = 2'-fluorocytidine-3'-phosphate
  modified_base 9: mod_base = OTHER; note = 2'-fluorouridine-3'-phosphate
  modified_base 10: mod_base = OTHER; note = 2'-fluoroguanosine-3'-phosphate
  modified_base 11: mod_base = OTHER; note = 2'-fluorouridine-3'-phosphate
  modified_base 21: mod_base = OTHER; note = L96
  source 1..21: mol_type = other RNA
aacattcctgtgaaaggcact

SEQ ID NO: 871 - RNA, 23 nt, synthetic construct
  modified_base 7: mod_base = OTHER; note = thymine
  misc_feature 1..23: note = Synthetic
  modified_base 1: mod_base = OTHER; note = 2'-O-methyladenosine-3'-phosphorothioate
  modified_base 2: mod_base = OTHER; note = 2'-fluoroguanosine -3'-phosphorothioate
  modified_base 6: mod_base = OTHER; note = 2'-fluorocytidine-3'-phosphate
  modified_base 7: mod_base = OTHER; note = Thymidine-glycol nucleic acid
  modified_base 14: mod_base = OTHER; note = 2'-fluoroguanosine-3'-phosphate
  modified_base 16: mod_base = OTHER; note = 2'-fluoroadenosine-3'-phosphate
  modified_base 21: mod_base = OTHER; note = 2'-O-methyluridine-3'- phosphorothioate
  modified_base 22: mod_base = OTHER; note = 2'-O-methyluridine-3'- phosphorothioate
  source 1..23: mol_type = other RNA
agtgcctttcacaggaatgtttt

SEQ ID NO: 872 - RNA, 23 nt, synthetic construct
  misc_feature 1..23: note = Synthetic
  source 1..23: mol_type = other RNA
aaaacattcctgtgaaaggcact

SEQ ID NO: 873 - RNA, 21 nt, synthetic construct
  misc_feature 1..21: note = Synthetic
  modified_base 1: mod_base = OTHER; note = 2'-O-methyladenosine-3'- phosphorothioate
  modified_base 2: mod_base = OTHER; note = 2'-O-methylcytidine-3'-phosphorothioate
  modified_base 7: mod_base = OTHER; note = 2'-fluorocytidine-3'-phosphate
  modified_base 9: mod_base = OTHER; note = 2'-fluoroguanosine-3'-phosphate
  modified_base 10: mod_base = OTHER; note = 2'-fluorouridine-3'-phosphate
  modified_base 11: mod_base = OTHER; note = 2'-fluoroguanosine-3'-phosphate
  modified_base 21: mod_base = OTHER; note = L96
  source 1..21: mol_type = other RNA
acattcctgtgaaaggcactt

SEQ ID NO: 874 - RNA, 23 nt, synthetic construct
  misc_feature 1..23: note = Synthetic
  modified_base 1: mod_base = OTHER; note = 2'-O-methyladenosine-3'- phosphorothioate
  modified_base 2: mod_base = OTHER; note = 2'-fluoroadenosine-3'-phosphorothioate
  modified_base 6: mod_base = OTHER; note = 2'-fluorocytidine-3'-phosphate
  modified_base 7: mod_base = OTHER; note = Cytidine-glycol nucleic acid
  modified_base 14: mod_base = OTHER; note = 2'-fluoroadenosine-3'-phosphate
  modified_base 16: mod_base = OTHER; note = 2'-fluoroguanosine-3'-phosphate
  modified_base 21: mod_base = OTHER; note = 2'-O-methyluridine-3'- phosphorothioate
  modified_base 22: mod_base = OTHER; note = 2'-O-methyluridine-3'- phosphorothioate
  source 1..23: mol_type = other RNA
aagtgcctttcacaggaatgttt

SEQ ID NO: 875 - RNA, 23 nt, synthetic construct
  misc_feature 1..23: note = Synthetic
  source 1..23: mol_type = other RNA
aaacattcctgtgaaaggcactt

SEQ ID NO: 876 - RNA, 21 nt, synthetic construct
  misc_feature 1..21: note = Synthetic
  modified_base 1: mod_base = OTHER; note = 2'-O-methylcytidine-3'- phosphorothioate
  modified_base 2: mod_base = OTHER; note = 2'-O-methyladenosine-3'-phosphorothioate
  modified_base 7: mod_base = OTHER; note = 2'-fluorouridine-3'-phosphate
  modified_base 9: mod_base = OTHER; note = 2'-fluorouridine-3'-phosphate
  modified_base 10: mod_base = OTHER; note = 2'-fluoroguanosine-3'-phosphate
  modified_base 11: mod_base = OTHER; note = 2'-fluoroadenosine-3'-phosphate
  modified_base 21: mod_base = OTHER; note = L96
  source 1..21: mol_type = other RNA
cattcctgtgaaaggcacttt

SEQ ID NO: 877 - RNA, 23 nt, synthetic construct
  misc_feature 1..23: note = Synthetic
  modified_base 1: mod_base = OTHER; note = 2'-O-methyladenosine-3'- phosphorothioate
  modified_base 2: mod_base = OTHER; note = 2'-fluoroadenosine-3'-phosphorothioate
  modified_base 6: mod_base = OTHER; note = 2'-fluoroguanosine-3'-phosphate
  modified_base 7: mod_base = OTHER; note = Cytidine-glycol nucleic acid
  modified_base 14: mod_base = OTHER; note = 2'-fluorocytidine-3'-phosphate
  modified_base 16: mod_base = OTHER; note = 2'-fluoroguanosine-3'-phosphate
  modified_base 21: mod_base = OTHER; note = 2'-O-methylguanosine-3'- phosphorothioate
  modified_base 22: mod_base = OTHER; note = 2'-O-methyluridine-3'- phosphorothioate
  source 1..23: mol_type = other RNA
aaagtgcctttcacaggaatgtt

SEQ ID NO: 878 - RNA, 23 nt, synthetic construct
  misc_feature 1..23: note = Synthetic
  source 1..23: mol_type = other RNA
aacattcctgtgaaaggcacttt

SEQ ID NO: 879 - RNA, 21 nt, synthetic construct
  misc_feature 1..21: note = Synthetic
  modified_base 1: mod_base = OTHER; note = 2'-O-methyladenosine-3'- phosphorothioate
  modified_base 2: mod_base = OTHER; note = 2'-O-methyluridine-3'-phosphorothioate
  modified_base 7: mod_base = OTHER; note = 2'-fluoroguanosine-3'-phosphate
  modified_base 9: mod_base = OTHER; note = 2'-fluoroguanosine-3'-phosphate
  modified_base 10: mod_base = OTHER; note = 2'-fluoroadenosine-3'-phosphate
  modified_base 11: mod_base = OTHER; note = 2'-fluoroadenosine-3'-phosphate
  modified_base 21: mod_base = OTHER; note = L96
  source 1..21: mol_type = other RNA
attcctgtgaaaggcactttt

SEQ ID NO: 880 - RNA, 23 nt, synthetic construct
  modified_base 6: mod_base = OTHER; note = thymine
  misc_feature 1..23: note = Synthetic
  modified_base 1: mod_base = OTHER; note = 2'-O-methyladenosine-3'- phosphorothioate
  modified_base 2: mod_base = OTHER; note = 2'-fluoroadenosine-3'-phosphorothioate
  modified_base 6: mod_base = OTHER; note = Thymidine-glycol nucleic acid
  modified_base 14: mod_base = OTHER; note = 2'-fluoroadenosine-3'-phosphate
  modified_base 16: mod_base = OTHER; note = 2'-fluoroadenosine-3'-phosphate
  modified_base 21: mod_base = OTHER; note = 2'-O-methyluridine-3'- phosphorothioate
  modified_base 22: mod_base = OTHER; note = 2'-O-methylguanosine-3'- phosphorothioate
  source 1..23: mol_type = other RNA
aaaagtgcctttcacaggaatgt

SEQ ID NO: 881 - RNA, 23 nt, synthetic construct
  misc_feature 1..23: note = Synthetic
  source 1..23: mol_type = other RNA
acattcctgtgaaaggcactttt

SEQ ID NO: 882 - RNA, 21 nt, synthetic construct
  misc_feature 1..21: note = Synthetic
  modified_base 1: mod_base = OTHER; note = 2'-O-methyluridine-3'- phosphorothioate
  modified_base 2: mod_base = OTHER; note = 2'-O-methyluridine-3'-phosphorothioate
  modified_base 7: mod_base = OTHER; note = 2'-fluorouridine-3'-phosphate
  modified_base 9: mod_base = OTHER; note = 2'-fluoroadenosine-3'-phosphate
  modified_base 10: mod_base = OTHER; note = 2'-fluoroadenosine-3'-phosphate
  modified_base 11: mod_base = OTHER; note = 2'-fluoroadenosine-3'-phosphate
  modified_base 21: mod_base = OTHER; note = L96
  source 1..21: mol_type = other RNA
ttcctgtgaaaggcacttttt

SEQ ID NO: 883 - RNA, 23 nt, synthetic construct
  modified_base 7: mod_base = OTHER; note = thymine
  misc_feature 1..23: note = Synthetic
  modified_base 1: mod_base = OTHER; note = 2'-O-methyladenosine-3'- phosphorothioate
  modified_base 2: mod_base = OTHER; note = 2'-fluoroadenosine-3'-phosphorothioate
  modified_base 6: mod_base = OTHER; note = 2'-fluoroguanosine-3'-phosphate
  modified_base 7: mod_base = OTHER; note = Thymidine-glycol nucleic acid
  modified_base 14: mod_base = OTHER; note = 2'-fluorocytidine-3'-phosphate
  modified_base 16: mod_base = OTHER; note = 2'-fluorocytidine-3'-phosphate
  modified_base 21: mod_base = OTHER; note = 2'-O-methyladenosine-3'- phosphorothioate
  modified_base 22: mod_base = OTHER; note = 2'-O-methyluridine-3'- phosphorothioate
  source 1..23: mol_type = other RNA
aaaaagtgcctttcacaggaatg

SEQ ID NO: 884 - RNA, 23 nt, synthetic construct
  misc_feature 1..23: note = Synthetic
  source 1..23: mol_type = other RNA
cattcctgtgaaaggcacttttc

SEQ ID NO: 885 - RNA, 21 nt, synthetic construct
  misc_feature 1..21: note = Synthetic
  modified_base 1: mod_base = OTHER; note = 2'-O-methyluridine-3'- phosphorothioate
  modified_base 2: mod_base = OTHER; note = 2'-O-methylcytidine-3'-phosphorothioate
  modified_base 7: mod_base = OTHER; note = 2'-fluoroguanosine-3'-phosphate
  modified_base 9: mod_base = OTHER; note = 2'-fluoroadenosine-3'-phosphate
  modified_base 10: mod_base = OTHER; note = 2'-fluoroadenosine-3'-phosphate
  modified_base 11: mod_base = OTHER; note = 2'-fluoroguanosine-3'-phosphate
  modified_base 21: mod_base = OTHER; note = L96
  source 1..21: mol_type = other RNA
tcctgtgaaaggcacttttca

SEQ ID NO: 886 - RNA, 23 nt, synthetic construct
  misc_feature 1..23: note = Synthetic
  modified_base 1: mod_base = OTHER; note = 2'-O-methyluridine-3'- phosphorothioate
  modified_base 2: mod_base = OTHER; note = 2'-fluoroguanosine-3'-phosphorothioate
  modified_base 6: mod_base = OTHER; note = Adenosine-glycol nucleic acid
  modified_base 14: mod_base = OTHER; note = 2'-fluorouridine-3'-phosphate
  modified_base 16: mod_base = OTHER; note = 2'-fluoroadenosine-3'-phosphate
  modified_base 21: mod_base = OTHER; note = 2'-O-methyladenosine-3'- phosphorothioate
  modified_base 22: mod_base = OTHER; note = 2'-O-methyladenosine-3'- phosphorothioate
  source 1..23: mol_type = other RNA
tgaaaagtgcctttcacaggaat

SEQ ID NO: 887 - RNA, 23 nt, synthetic construct
  misc_feature 1..23: note = Synthetic
  source 1..23: mol_type = other RNA
attcctgtgaaaggcacttttca

SEQ ID NO: 888 - RNA, 21 nt, synthetic construct
  misc_feature 1..21: note = Synthetic
  modified_base 1: mod_base = OTHER; note = 2'-O-methylcytidine-3'- phosphorothioate
  modified_base 2: mod_base = OTHER; note = 2'-O-methylcytidine-3'-phosphorothioate
  modified_base 7: mod_base = OTHER; note = 2'-fluoroadenosine-3'-phosphate
  modified_base 9: mod_base = OTHER; note = 2'-fluoroadenosine-3'-phosphate
  modified_base 10: mod_base = OTHER; note = 2'-fluoroguanosine-3'-phosphate
  modified_base 11: mod_base = OTHER; note = 2'-fluoroguanosine-3'-phosphate
  modified_base 21: mod_base = OTHER; note = L96
  source 1..21: mol_type = other RNA
cctgtgaaaggcacttttcat

SEQ ID NO: 889 - RNA, 23 nt, synthetic construct
  misc_feature 1..23: note = Synthetic
  modified_base 1: mod_base = OTHER; note = 2'-O-methyladenosine-3'-phosphorothioate
  modified_base 2: mod_base = OTHER; note = 2'-fluorouridine -3'-phosphorothioate
  modified_base 6: mod_base = OTHER; note = 2'-fluoroadenosine-3'-phosphate
  modified_base 7: mod_base = OTHER; note = Adenosine-glycol nucleic acid
  modified_base 14: mod_base = OTHER; note = 2'-fluorouridine-3'-phosphate
  modified_base 16: mod_base = OTHER; note = 2'-fluorocytidine-3'-phosphate
  modified_base 21: mod_base = OTHER; note = 2'-O-methylguanosine-3'- phosphorothioate
  modified_base 22: mod_base = OTHER; note = 2'-O-methyladenosine-3'- phosphorothioate
  source 1..23: mol_type = other RNA
atgaaaagtgcctttcacaggaa

SEQ ID NO: 890 - RNA, 23 nt, synthetic construct
  misc_feature 1..23: note = Synthetic
  source 1..23: mol_type = other RNA
ttcctgtgaaaggcacttttcat

SEQ ID NO: 891 - RNA, 21 nt, synthetic construct
  misc_feature 1..21: note = Synthetic
  modified_base 1: mod_base = OTHER; note = 2'-O-methylcytidine-3'- phosphorothioate
  modified_base 2: mod_base = OTHER; note = 2'-O-methyluridine-3'-phosphorothioate
  modified_base 7: mod_base = OTHER; note = 2'-fluoroadenosine-3'-phosphate
  modified_base 9: mod_base = OTHER; note = 2'-fluoroguanosine-3'-phosphate
  modified_base 10: mod_base = OTHER; note = 2'-fluoroguanosine-3'-phosphate
  modified_base 11: mod_base = OTHER; note = 2'-fluorocytidine-3'-phosphate
  modified_base 21: mod_base = OTHER; note = L96
  source 1..21: mol_type = other RNA
ctgtgaaaggcacttttcatt

SEQ ID NO: 892 - RNA, 23 nt, synthetic construct
  misc_feature 1..23: note = Synthetic
  modified_base 1: mod_base = OTHER; note = 2'-O-methyladenosine-3'- phosphorothioate
  modified_base 2: mod_base = OTHER; note = 2'-fluoroadenosine-3'-phosphorothioate
  modified_base 6: mod_base = OTHER; note = 2'-fluoroadenosine-3'-phosphate
  modified_base 7: mod_base = OTHER; note = Adenosine-glycol nucleic acid
  modified_base 14: mod_base = OTHER; note = 2'-fluorouridine-3'-phosphate
  modified_base 16: mod_base = OTHER; note = 2'-fluorouridine-3'-phosphate
  modified_base 21: mod_base = OTHER; note = 2'-O-methylguanosine-3'- phosphorothioate
  modified_base 22: mod_base = OTHER; note = 2'-O-methylguanosine-3'- phosphorothioate
  source 1..23: mol_type = other RNA
aatgaaaagtgcctttcacagga

SEQ ID NO: 893 - RNA, 23 nt, synthetic construct
  misc_feature 1..23: note = Synthetic
  source 1..23: mol_type = other RNA
tcctgtgaaaggcacttttcatt

SEQ ID NO: 894 - RNA, 21 nt, synthetic construct
  misc_feature 1..21: note = Synthetic
  modified_base 1: mod_base = OTHER; note = 2'-O-methyluridine-3'-phosphorothioate
  modified_base 2: mod_base = OTHER; note = 2'-O-methylguanosine-3'-phosphorothioate
  modified_base 7: mod_base = OTHER; note = 2'-fluoroadenosine-3'-phosphate
  modified_base 9: mod_base = OTHER; note = 2'-fluoroguanosine-3'-phosphate
  modified_base 10: mod_base = OTHER; note = 2'-fluorocytidine-3'-phosphate
  modified_base 11: mod_base = OTHER; note = 2'-fluoroadenosine-3'-phosphate
  modified_base 21: mod_base = OTHER; note = L96
  source 1..21: mol_type = other RNA
tgtgaaaggcacttttcattt

SEQ ID NO: 895 - RNA, 23 nt, synthetic construct
  misc_feature 1..23: note = Synthetic
  modified_base 1: mod_base = OTHER; note = 2'-O-methyladenosine-3'- phosphorothioate
  modified_base 2: mod_base = OTHER; note = 2'-fluoroadenosine-3'-phosphorothioate
  modified_base 6: mod_base = OTHER; note = 2'-fluoroadenosine-3'-phosphate
  modified_base 7: mod_base = OTHER; note = Adenosine-glycol nucleic acid
  modified_base 14: mod_base = OTHER; note = 2'-fluorocytidine-3'-phosphate
  modified_base 16: mod_base = OTHER; note = 2'-fluorouridine-3'-phosphate
  modified_base 21: mod_base = OTHER; note = 2'-O-methyladenosine-3'- phosphorothioate
  modified_base 22: mod_base = OTHER; note = 2'-O-methylguanosine-3'- phosphorothioate
  source 1..23: mol_type = other RNA
aaatgaaaagtgcctttcacagg

SEQ ID NO: 896 - RNA, 23 nt, synthetic construct
  misc_feature 1..23: note = Synthetic
  source 1..23: mol_type = other RNA
cctgtgaaaggcacttttcattc

SEQ ID NO: 897 - RNA, 21 nt, synthetic construct
  misc_feature 1..21: note = Synthetic
  modified_base 1: mod_base = OTHER; note = 2'-O-methylguanosine-3'- phosphorothioate
  modified_base 2: mod_base = OTHER; note = 2'-O-methyluridine-3'-phosphorothioate
  modified_base 7: mod_base = OTHER; note = 2'-fluoroguanosine-3'-phosphate
  modified_base 9: mod_base = OTHER; note = 2'-fluoroacytidine-3'-phosphate
  modified_base 10: mod_base = OTHER; note = 2'-fluoroadenosine-3'-phosphate
  modified_base 11: mod_base = OTHER; note = 2'-fluorocytidine-3'-phosphate
  modified_base 21: mod_base = OTHER; note = L96
  source 1..21: mol_type = other RNA
gtgaaaggcacttttcattct

SEQ ID NO: 898 - RNA, 23 nt, synthetic construct
  misc_feature 1..23: note = Synthetic
  modified_base 1: mod_base = OTHER; note = 2'-O-methyladenosine-3'- phosphorothioate
  modified_base 2: mod_base = OTHER; note = 2'-fluoroguanosine-3'-phosphorothioate
  modified_base 6: mod_base = OTHER; note = 2'-fluoroguanosine-3'-phosphate
  modified_base 7: mod_base = OTHER; note = Adenosine-glycol nucleic acid
  modified_base 14: mod_base = OTHER; note = 2'-fluorocytidine-3'-phosphate
  modified_base 16: mod_base = OTHER; note = 2'-fluorouridine-3'-phosphate
  modified_base 21: mod_base = OTHER; note = 2'-O-methylcytidine-3'- phosphorothioate
  modified_base 22: mod_base = OTHER; note = 2'-O-methyladenosine-3'- phosphorothioate
  source 1..23: mol_type = other RNA
agaatgaaaagtgcctttcacag

SEQ ID NO: 899 - RNA, 23 nt, synthetic construct
  misc_feature 1..23: note = Synthetic
  source 1..23: mol_type = other RNA
ctgtgaaaggcacttttcattcc

SEQ ID NO: 900 - RNA, 21 nt, synthetic construct
  misc_feature 1..21: note = Synthetic
  modified_base 1: mod_base = OTHER; note = 2'-O-methyluridine-3'-phosphorothioate
  modified_base 2: mod_base = OTHER; note = 2'-O-methylguanosine-3'-phosphorothioate
  modified_base 7: mod_base = OTHER; note = 2'-fluoroguanosine-3'-phosphate
  modified_base 9: mod_base = OTHER; note = 2'-fluoroadenosine-3'-phosphate
  modified_base 10: mod_base = OTHER; note = 2'-fluorocytidine-3'-phosphate
  modified_base 11: mod_base = OTHER; note = 2'-fluorouridine-3'-phosphate
  modified_base 21: mod_base = OTHER; note = L96
  source 1..21: mol_type = other RNA
tgaaaggcacttttcattcca

SEQ ID NO: 901 - RNA, 23 nt, synthetic construct
  modified_base 6: mod_base = OTHER; note = thymine
  misc_feature 1..23: note = Synthetic
  modified_base 1: mod_base = OTHER; note = 2'-O-methyluridine-3'- phosphorothioate
  modified_base 2: mod_base = OTHER; note = 2'-fluoroguanosine-3'-phosphorothioate
  modified_base 6: mod_base = OTHER; note = Thymidine-glycol nucleic acid
  modified_base 14: mod_base = OTHER; note = 2'-fluoroguanosine-3'-phosphate
  modified_base 16: mod_base = OTHER; note = 2'-fluorocytidine-3'-phosphate
  modified_base 21: mod_base = OTHER; note = 2'-O-methyladenosine-3'- phosphorothioate
  modified_base 22: mod_base = OTHER; note = 2'-O-methylcytidine-3'- phosphorothioate
  source 1..23: mol_type = other RNA
tggaatgaaaagtgcctttcaca

SEQ ID NO: 902 - RNA, 23 nt, synthetic construct
  misc_feature 1..23: note = Synthetic
  source 1..23: mol_type = other RNA
tgtgaaaggcacttttcattcca

SEQ ID NO: 903 - RNA, 21 nt, synthetic construct
  misc_feature 1..21: note = Synthetic
  modified_base 1: mod_base = OTHER; note = 2'-O-methylguanosine-3'- phosphorothioate
  modified_base 2: mod_base = OTHER; note = 2'-O-methyladenosine-3'-phosphorothioate
  modified_base 7: mod_base = OTHER; note = 2'-fluorocytidine-3'-phosphate
  modified_base 9: mod_base = OTHER; note = 2'-fluorocytidine-3'-phosphate
  modified_base 10: mod_base = OTHER; note = 2'-fluorouridine-3'-phosphate
  modified_base 11: mod_base = OTHER; note = 2'-fluorouridine-3'-phosphate
  modified_base 21: mod_base = OTHER; note = L96
  source 1..21: mol_type = other RNA
gaaaggcacttttcattccat

SEQ ID NO: 904 - RNA, 23 nt, synthetic construct
  modified_base 7: mod_base = OTHER; note = thymine
  misc_feature 1..23: note = Synthetic
  modified_base 1: mod_base = OTHER; note = 2'-O-methyladenosine-3'-phosphorothioate
  modified_base 2: mod_base = OTHER; note = 2'-fluorouridine -3'-phosphorothioate
  modified_base 6: mod_base = OTHER; note = 2'-fluoroadenosine-3'-phosphate
  modified_base 7: mod_base = OTHER; note = Thymidine-glycol nucleic acid
  modified_base 14: mod_base = OTHER; note = 2'-fluorouridine-3'-phosphate
  modified_base 16: mod_base = OTHER; note = 2'-fluorocytidine-3'-phosphate
  modified_base 21: mod_base = OTHER; note = 2'-O-methylcytidine-3'- phosphorothioate
  modified_base 22: mod_base = OTHER; note = 2'-O-methyladenosine-3'- phosphorothioate
  source 1..23: mol_type = other RNA
atggaatgaaaagtgcctttcac

SEQ ID NO: 905 - RNA, 23 nt, synthetic construct
  misc_feature 1..23: note = Synthetic
  source 1..23: mol_type = other RNA
gtgaaaggcacttttcattccac

SEQ ID NO: 906 - RNA, 21 nt, synthetic construct
  misc_feature 1..21: note = Synthetic
  modified_base 1: mod_base = OTHER; note = 2'-O-methyluridine-3'-phosphorothioate
  modified_base 2: mod_base = OTHER; note = 2'-O-methylguanosine-3'-phosphorothioate
  modified_base 7: mod_base = OTHER; note = 2'-fluorocytidine-3'-phosphate
  modified_base 9: mod_base = OTHER; note = 2'-fluoroadenosine-3'-phosphate
  modified_base 10: mod_base = OTHER; note = 2'-fluoroguanine-3'-phosphate
  modified_base 11: mod_base = OTHER; note = 2'-fluoroadenosine-3'-phosphate
  modified_base 21: mod_base = OTHER; note = L96
  source 1..21: mol_type = other RNA
tgtaaccaagagtattccatt

SEQ ID NO: 907 - RNA, 23 nt, synthetic construct
  misc_feature 1..23: note = Synthetic
  modified_base 1: mod_base = OTHER; note = 2'-O-methyladenosine-3'-phosphorothioate
  modified_base 2: mod_base = OTHER; note = 2'-fluoroadenosine -3'-phosphorothioate
  modified_base 6: mod_base = OTHER; note = 2'-fluoroadenosine-3'-phosphate
  modified_base 14: mod_base = OTHER; note = 2'-fluorouridine-3'-phosphate
  modified_base 16: mod_base = OTHER; note = 2'-fluoroguanosine-3'-phosphate
  modified_base 21: mod_base = OTHER; note = 2'-O-methyladenosine-3'- phosphorothioate
  modified_base 22: mod_base = OTHER; note = 2'-O-methyluridine-3'- phosphorothioate
  source 1..23: mol_type = other RNA
aatggaatactcttggttacatg

SEQ ID NO: 908 - RNA, 23 nt, synthetic construct
  misc_feature 1..23: note = Synthetic
  source 1..23: mol_type = other RNA
catgtaaccaagagtattccatt

SEQ ID NO: 909 - RNA, 21 nt, synthetic construct
  misc_feature 1..21: note = Synthetic
  modified_base 1: mod_base = OTHER; note = 2'-O-methyladenosine-3'- phosphorothioate
  modified_base 2: mod_base = OTHER; note = 2'-O-methyladenosine-3'-phosphorothioate
  modified_base 7: mod_base = OTHER; note = 2'-fluoroguanosine-3'-phosphate
  modified_base 9: mod_base = OTHER; note = 2'-fluoroguanosine-3'-phosphate
  modified_base 10: mod_base = OTHER; note = 2'-fluorouridine-3'-phosphate
  modified_base 11: mod_base = OTHER; note = 2'-fluoroadenosine-3'-phosphate
  modified_base 21: mod_base = OTHER; note = L96
  source 1..21: mol_type = other RNA
aaccaagagtattccattttt

SEQ ID NO: 910 - RNA, 23 nt, synthetic construct
  misc_feature 1..23: note = Synthetic
  modified_base 1: mod_base = OTHER; note = 2'-O-methyladenosine-3'-phosphorothioate
  modified_base 2: mod_base = OTHER; note = 2'-fluoroadenosine -3'-phosphorothioate
  modified_base 6: mod_base = OTHER; note = 2'-fluorouridine-3'-phosphate
  modified_base 14: mod_base = OTHER; note = 2'-fluorouridine-3'-phosphate
  modified_base 16: mod_base = OTHER; note = 2'-fluorouridine-3'-phosphate
  modified_base 21: mod_base = OTHER; note = 2'-O-methyluridine-3'- phosphorothioate
  modified_base 22: mod_base = OTHER; note = 2'-O-methyladenosine-3'- phosphorothioate
  source 1..23: mol_type = other RNA
aaaaatggaatactcttggttac

SEQ ID NO: 911 - RNA, 23 nt, synthetic construct
  misc_feature 1..23: note = Synthetic
  source 1..23: mol_type = other RNA
gtaaccaagagtattccattttt

SEQ ID NO: 912 - RNA, 21 nt, synthetic construct
  misc_feature 1..21: note = Synthetic
  modified_base 1: mod_base = OTHER; note = 2'-O-methylcytidine-3'- phosphorothioate
  modified_base 2: mod_base = OTHER; note = 2'-O-methyladenosine-3'-phosphorothioate
  modified_base 7: mod_base = OTHER; note = 2'-fluorocytidine-3'-phosphate
  modified_base 9: mod_base = OTHER; note = 2'-fluoroadenosine-3'-phosphate
  modified_base 10: mod_base = OTHER; note = 2'-fluorouridine-3'-phosphate
  modified_base 11: mod_base = OTHER; note = 2'-fluoroadenosine-3'-phosphate
  modified_base 21: mod_base = OTHER; note = L96
  source 1..21: mol_type = other RNA
cagagacaataaaacattcct

SEQ ID NO: 913 - RNA, 23 nt, synthetic construct
  misc_feature 1..23: note = Synthetic
  modified_base 1: mod_base = OTHER; note = 2'-O-methyladenosine-3'- phosphorothioate
  modified_base 2: mod_base = OTHER; note = 2'-fluoroguanosine-3'-phosphorothioate
  modified_base 6: mod_base = OTHER; note = 2'-fluorouridine-3'-phosphate
  modified_base 14: mod_base = OTHER; note = 2'-fluorouridine-3'-phosphate
  modified_base 16: mod_base = OTHER; note = 2'-fluorouridine-3'-phosphate
  modified_base 21: mod_base = OTHER; note = 2'-O-methylguanosine-3'-phosphorothioate
  modified_base 22: mod_base = OTHER; note = 2'-O-methylcytidine-3'- phosphorothioate
  source 1..23: mol_type = other RNA
aggaatgttttattgtctctgcc

SEQ ID NO: 914 - RNA, 23 nt, synthetic construct
  misc_feature 1..23: note = Synthetic
  source 1..23: mol_type = other RNA
ggcagagacaataaaacattcct

SEQ ID NO: 915 - RNA, 21 nt, synthetic construct
  misc_feature 1..21: note = Synthetic
  modified_base 1: mod_base = OTHER; note = 2'-O-methyluridine-3'- phosphorothioate
  modified_base 2: mod_base = OTHER; note = 2'-O-methyluridine-3'-phosphorothioate
  modified_base 7: mod_base = OTHER; note = 2'-fluorocytidine-3'-phosphate
  modified_base 9: mod_base = OTHER; note = 2'-fluoroadenosine-3'-phosphate
  modified_base 10: mod_base = OTHER; note = 2'-fluoroadenosine-3'-phosphate
  modified_base 11: mod_base = OTHER; note = 2'-fluoroadenosine-3'-phosphate
  modified_base 21: mod_base = OTHER; note = L96
  source 1..21: mol_type = other RNA
tttttactaaagcagtgtttt

SEQ ID NO: 916 - RNA, 23 nt, synthetic construct
  misc_feature 1..23: note = Synthetic
  modified_base 1: mod_base = OTHER; note = 2'-O-methyladenosine-3'-phosphorothioate
  modified_base 2: mod_base = OTHER; note = 2'-fluoroadenosine -3'-phosphorothioate
  modified_base 6: mod_base = OTHER; note = 2'-fluoroadenosine-3'-phosphate
  modified_base 14: mod_base = OTHER; note = 2'-fluoroadenosine-3'-phosphate
  modified_base 16: mod_base = OTHER; note = 2'-fluorouridine-3'-phosphate
  modified_base 21: mod_base = OTHER; note = 2'-O-methyladenosine-3'- phosphorothioate
  modified_base 22: mod_base = OTHER; note = 2'-O-methyluridine-3'- phosphorothioate
  source 1..23: mol_type = other RNA
aaaacactgctttagtaaaaatg

SEQ ID NO: 917 - RNA, 23 nt, synthetic construct
  misc_feature 1..23: note = Synthetic
  source 1..23: mol_type = other RNA
catttttactaaagcagtgtttt

SEQ ID NO: 918 - RNA, 21 nt, synthetic construct
  misc_feature 1..21: note = Synthetic
  modified_base 1: mod_base = OTHER; note = 2'-O-methyluridine-3'- phosphorothioate
  modified_base 2: mod_base = OTHER; note = 2'-O-methyluridine-3'-phosphorothioate
  modified_base 7: mod_base = OTHER; note = 2'-fluoroguanosine-3'-phosphate
  modified_base 9: mod_base = OTHER; note = 2'-fluoroadenosine-3'-phosphate
  modified_base 10: mod_base = OTHER; note = 2'-fluoroadenosine-3'-phosphate
  modified_base 11: mod_base = OTHER; note = 2'-fluorocytidine-3'-phosphate
  modified_base 21: mod_base = OTHER; note = L96
  source 1..21: mol_type = other RNA
tttcatgtaaccaagagtatt

SEQ ID NO: 919 - RNA, 23 nt, synthetic construct
  misc_feature 1..23: note = Synthetic
  modified_base 1: mod_base = OTHER; note = 2'-O-methyladenosine-3'-phosphorothioate
  modified_base 2: mod_base = OTHER; note = 2'-fluoroadenosine -3'-phosphorothioate
  modified_base 6: mod_base = OTHER; note = 2'-fluorouridine-3'-phosphate
  modified_base 14: mod_base = OTHER; note = 2'-fluoroadenosine-3'-phosphate
  modified_base 16: mod_base = OTHER; note = 2'-fluoroadenosine-3'-phosphate
  modified_base 21: mod_base = OTHER; note = 2'-O-methyladenosine-3'- phosphorothioate
  modified_base 22: mod_base = OTHER; note = 2'-O-methyluridine-3'- phosphorothioate
  source 1..23: mol_type = other RNA
aatactcttggttacatgaaatc

SEQ ID NO: 920 - RNA, 23 nt, synthetic construct
  misc_feature 1..23: note = Synthetic
  source 1..23: mol_type = other RNA
gatttcatgtaaccaagagtatt

SEQ ID NO: 921 - RNA, 21 nt, synthetic construct
  misc_feature 1..21: note = Synthetic
  modified_base 1: mod_base = OTHER; note = 2'-O-methylcytidine-3'- phosphorothioate
  modified_base 2: mod_base = OTHER; note = 2'-O-methyladenosine-3'-phosphorothioate
  modified_base 7: mod_base = OTHER; note = 2'-fluoroadenosine-3'-phosphate
  modified_base 9: mod_base = OTHER; note = 2'-fluorocytidine-3'-phosphate
  modified_base 10: mod_base = OTHER; note = 2'-fluoroadenosine-3'-phosphate
  modified_base 11: mod_base = OTHER; note = 2'-fluorouridine-3'-phosphate
  modified_base 21: mod_base = OTHER; note = L96
  source 1..21: mol_type = other RNA
caataaaacattcctgtgaaa

SEQ ID NO: 922 - RNA, 23 nt, synthetic construct
  misc_feature 1..23: note = Synthetic
  modified_base 1: mod_base = OTHER; note = 2'-O-methyluridine-3'- phosphorothioate
  modified_base 2: mod_base = OTHER; note = 2'-fluorouridine-3'-phosphorothioate
  modified_base 6: mod_base = OTHER; note = 2'-fluorocytidine-3'-phosphate
  modified_base 14: mod_base = OTHER; note = 2'-fluorouridine-3'-phosphate
  modified_base 16: mod_base = OTHER; note = 2'-fluorouridine-3'-phosphate
  modified_base 21: mod_base = OTHER; note = 2'-O-methylguanosine-3'-phosphorothioate
  modified_base 22: mod_base = OTHER; note = 2'-O-methyluridine-3'- phosphorothioate
  source 1..23: mol_type = other RNA
tttcacaggaatgttttattgtc

SEQ ID NO: 923 - RNA, 23 nt, synthetic construct
  misc_feature 1..23: note = Synthetic
  source 1..23: mol_type = other RNA
gacaataaaacattcctgtgaaa

SEQ ID NO: 924 - RNA, 21 nt, synthetic construct
  misc_feature 1..21: note = Synthetic
  modified_base 1: mod_base = OTHER; note = 2'-O-methyladenosine-3'- phosphorothioate
  modified_base 2: mod_base = OTHER; note = 2'-O-methyladenosine-3'-phosphorothioate
  modified_base 7: mod_base = OTHER; note = 2'-fluoroguanosine-3'-phosphate
  modified_base 9: mod_base = OTHER; note = 2'-fluoroguanosine-3'-phosphate
  modified_base 10: mod_base = OTHER; note = 2'-fluorouridine-3'-phosphate
  modified_base 11: mod_base = OTHER; note = 2'-fluoroadenosine-3'-phosphate
  modified_base 21: mod_base = OTHER; note = L96
  source 1..21: mol_type = other RNA
aaccaagagtattccattttt

SEQ ID NO: 925 - RNA, 23 nt, synthetic construct
  modified_base 6: mod_base = OTHER; note = thymine
  misc_feature 1..23: note = Synthetic
  modified_base 1: mod_base = OTHER; note = 2'-O-methyladenosine-3'- phosphorothioate
  modified_base 2: mod_base = OTHER; note = 2'-fluoroadenosine-3'-phosphorothioate
  modified_base 6: mod_base = OTHER; note = Thymidine-glycol nucleic acid
  modified_base 14: mod_base = OTHER; note = 2'-fluorouridine-3'-phosphate
  modified_base 16: mod_base = OTHER; note = 2'-fluorouridine-3'-phosphate
  modified_base 21: mod_base = OTHER; note = 2'-O-methyluridine-3'- phosphorothioate
  modified_base 22: mod_base = OTHER; note = 2'-O-methyladenosine-3'- phosphorothioate
  source 1..23: mol_type = other RNA
aaaaatggaatactcttggttac

SEQ ID NO: 926 - RNA, 23 nt, synthetic construct
  misc_feature 1..23: note = Synthetic
  source 1..23: mol_type = other RNA
gtaaccaagagtattccattttt

SEQ ID NO: 927 - RNA, 21 nt, synthetic construct
  misc_feature 1..21: note = Synthetic
  modified_base 1: mod_base = OTHER; note = 2'-O-methylcytidine-3'- phosphorothioate
  modified_base 2: mod_base = OTHER; note = 2'-O-methyladenosine-3'-phosphorothioate
  modified_base 7: mod_base = OTHER; note = 2'-fluorocytidine-3'-phosphate
  modified_base 9: mod_base = OTHER; note = 2'-fluoroadenosine-3'-phosphate
  modified_base 10: mod_base = OTHER; note = 2'-fluorouridine-3'-phosphate
  modified_base 11: mod_base = OTHER; note = 2'-fluoroadenosine-3'-phosphate
  modified_base 21: mod_base = OTHER; note = L96
  source 1..21: mol_type = other RNA
cagagacaataaaacattcct

SEQ ID NO: 928 - RNA, 23 nt, synthetic construct
  modified_base 6: mod_base = OTHER; note = thymine
  misc_feature 1..23: note = Synthetic
  modified_base 1: mod_base = OTHER; note = 2'-O-methyladenosine-3'-phosphorothioate
  modified_base 2: mod_base = OTHER; note = 2'-fluoroguanosine -3'-phosphorothioate
  modified_base 6: mod_base = OTHER; note = Thymidine-glycol nucleic acid
  modified_base 14: mod_base = OTHER; note = 2'-fluorouridine-3'-phosphate
  modified_base 16: mod_base = OTHER; note = 2'-fluorouridine-3'-phosphate
  modified_base 21: mod_base = OTHER; note = 2'-O-methylguanosine-3'- phosphorothioate
  modified_base 22: mod_base = OTHER; note = 2'-O-methylcytidine-3'- phosphorothioate
  source 1..23: mol_type = other RNA
aggaatgttttattgtctctgcc

SEQ ID NO: 929 - RNA, 23 nt, synthetic construct
  misc_feature 1..23: note = Synthetic
  source 1..23: mol_type = other RNA
ggcagagacaataaaacattcct

SEQ ID NO: 930 - RNA, 21 nt, synthetic construct
  misc_feature 1..21: note = Synthetic
  modified_base 1: mod_base = OTHER; note = 2'-O-methyluridine-3'-phosphorothioate
  modified_base 2: mod_base = OTHER; note = 2'-O-methylguanosine-3'-phosphorothioate
  modified_base 7: mod_base = OTHER; note = 2'-fluorouridine-3'-phosphate
  modified_base 9: mod_base = OTHER; note = 2'-fluorocytidine-3'-phosphate
  modified_base 10: mod_base = OTHER; note = 2'-fluoroadenosine-3'-phosphate
  modified_base 11: mod_base = OTHER; note = 2'-fluorouridine-3'-phosphate
  modified_base 21: mod_base = OTHER; note = L96
  source 1..21: mol_type = other RNA
tgggatttcatgtaaccaaga

SEQ ID NO: 931 - RNA, 23 nt, synthetic construct
  misc_feature 1..23: note = Synthetic
  modified_base 1: mod_base = OTHER; note = 2'-O-methyluridine-3'-phosphorothioate
  modified_base 2: mod_base = OTHER; note = 2'-fluorocytidine-3'-phosphorothioate
  modified_base 6: mod_base = OTHER; note = 2'-fluoroguanosine-3'-phosphate
  modified_base 14: mod_base = OTHER; note = 2'-fluoroadenosine-3'-phosphate
  modified_base 16: mod_base = OTHER; note = 2'-fluoroadenosine-3'-phosphate
  modified_base 21: mod_base = OTHER; note = 2'-O-methylcytidine-3'-phosphorothioate
  modified_base 22: mod_base = OTHER; note = 2'-O-methyluridine-3'-phosphorothioate
  source 1..23: mol_type = other RNA
tcttggttacatgaaatcccatc

SEQ ID NO: 932 - RNA, 23 nt, synthetic construct
  misc_feature 1..23: note = Synthetic
  source 1..23: mol_type = other RNA
gatgggatttcatgtaaccaaga

SEQ ID NO: 933 - RNA, 21 nt, synthetic construct
  misc_feature 1..21: note = Synthetic
  source 1..21: mol_type = other RNA
ccaagagtattccatttttat

SEQ ID NO: 934 - RNA, 23 nt, synthetic construct
  misc_feature 1..23: note = Synthetic
  source 1..23: mol_type = other RNA
ataaaaatggaatactcttggtt

SEQ ID NO: 935 - RNA, 21 nt, synthetic construct
  misc_feature 1..21: note = Synthetic
  source 1..21: mol_type = other RNA
ccaagagtattccatttttat

SEQ ID NO: 936 - RNA, 23 nt, synthetic construct
  misc_feature 1..23: note = Synthetic
  source 1..23: mol_type = other RNA
ataaaaatggaatactcttggtt

SEQ ID NO: 937 - RNA, 21 nt, synthetic construct
  misc_feature 1..21: note = Synthetic
  source 1..21: mol_type = other RNA
ccaagagtattccatttttat

SEQ ID NO: 938 - RNA, 23 nt, synthetic construct
  misc_feature 1..23: note = Synthetic
  source 1..23: mol_type = other RNA
ataaaaatggaatactcttggtt

SEQ ID NO: 939 - RNA, 21 nt, synthetic construct
  misc_feature 1..21: note = Synthetic
  source 1..21: mol_type = other RNA
ccaagagtattccatttttat

SEQ ID NO: 940 - RNA, 23 nt, synthetic construct
  misc_feature 1..23: note = Synthetic
  source 1..23: mol_type = other RNA
ataaaaatggaatactcttggtt

SEQ ID NO: 941 - RNA, 21 nt, synthetic construct
  misc_feature 1..21: note = Synthetic
  source 1..21: mol_type = other RNA
ccaagagtattccatttttat

SEQ ID NO: 942 - RNA, 23 nt, synthetic construct
  misc_feature 1..23: note = Synthetic
  source 1..23: mol_type = other RNA
ataaaaatggaatactcttggtt

SEQ ID NO: 943 - RNA, 21 nt, synthetic construct
  misc_feature 1..21: note = Synthetic
  source 1..21: mol_type = other RNA
ccaagagtattccatttttat

SEQ ID NO: 944 - RNA, 23 nt, synthetic construct
  misc_feature 1..23: note = Synthetic
  source 1..23: mol_type = other RNA
ataaaaatggaatactcttggtt

SEQ ID NO: 945 - RNA, 21 nt, synthetic construct
  misc_feature 1..21: note = Synthetic
  source 1..21: mol_type = other RNA
ccaagagtattccatttttat

SEQ ID NO: 946 - RNA, 23 nt, synthetic construct
  misc_feature 1..23: note = Synthetic
  source 1..23: mol_type = other RNA
ataaaaatggaatactcttggtt

SEQ ID NO: 947 - RNA, 21 nt, synthetic construct
  misc_feature 1..21: note = Synthetic
  source 1..21: mol_type = other RNA
ccaagagtattccatttttat

SEQ ID NO: 948 - RNA, 23 nt, synthetic construct
  misc_feature 1..23: note = Synthetic
  source 1..23: mol_type = other RNA
ataaaaatggaatactcttggtt

SEQ ID NO: 949 - RNA, 21 nt, synthetic construct
  misc_feature 1..21: note = Synthetic
  source 1..21: mol_type = other RNA
ccaagagtattccatttttat

SEQ ID NO: 950 - RNA, 23 nt, synthetic construct
  misc_feature 1..23: note = Synthetic
  source 1..23: mol_type = other RNA
ataaaaatggaatactcttggtt

SEQ ID NO: 951 - RNA, 21 nt, synthetic construct
  misc_feature 1..21: note = Synthetic
  source 1..21: mol_type = other RNA
ccaagagtattccatttttat

SEQ ID NO: 952 - RNA, 23 nt, synthetic construct
  misc_feature 1..23: note = Synthetic
  source 1..23: mol_type = other RNA
ataaaaatggaatactcttggtt

SEQ ID NO: 953 - RNA, 21 nt, synthetic construct
  misc_feature 1..21: note = Synthetic
  source 1..21: mol_type = other RNA
ccaagagtattccatttttat

SEQ ID NO: 954 - RNA, 23 nt, synthetic construct
  misc_feature 1..23: note = Synthetic
  source 1..23: mol_type = other RNA
ataaaaatggaatactcttggtt

SEQ ID NO: 955 - RNA, 21 nt, synthetic construct
  misc_feature 1..21: note = Synthetic
  source 1..21: mol_type = other RNA
ccaagagtattccatttttat

SEQ ID NO: 956 - RNA, 23 nt, synthetic construct
  misc_feature 1..23: note = Synthetic
  source 1..23: mol_type = other RNA
ataaaaatggaatactcttggtt

SEQ ID NO: 957 - RNA, 21 nt, synthetic construct
  misc_feature 1..21: note = Synthetic
  source 1..21: mol_type = other RNA
ccaagagtattccatttttat

SEQ ID NO: 958 - RNA, 23 nt, synthetic construct
  misc_feature 1..23: note = Synthetic
  source 1..23: mol_type = other RNA
ataaaaatggaatactcttggcc

SEQ ID NO: 959 - RNA, 19 nt, synthetic construct
  misc_feature 1..19: note = Synthetic
  source 1..19: mol_type = other RNA
aagagtattccatttttat

SEQ ID NO: 960 - RNA, 21 nt, synthetic construct
  misc_feature 1..21: note = Synthetic
  source 1..21: mol_type = other RNA
ataaaaatggaatactcttgg

SEQ ID NO: 961 - RNA, 21 nt, synthetic construct
  misc_feature 1..21: note = Synthetic
  source 1..21: mol_type = other RNA
ccaagagtattccatttttat

SEQ ID NO: 962 - RNA, 23 nt, synthetic construct
  misc_feature 1..23: note = Synthetic
  source 1..23: mol_type = other RNA
ataaaaatggaatactcttggcc

SEQ ID NO: 963 - RNA, 19 nt, synthetic construct
  misc_feature 1..19: note = Synthetic
  source 1..19: mol_type = other RNA
aagagtattccatttttat

SEQ ID NO: 964 - RNA, 21 nt, synthetic construct
  misc_feature 1..21: note = Synthetic
  source 1..21: mol_type = other RNA
ataaaaatggaatactcttgg

SEQ ID NO: 965 - RNA, 21 nt, synthetic construct
  misc_feature 1..21: note = Synthetic
  source 1..21: mol_type = other RNA
ccaagagtattccatttttat

SEQ ID NO: 966 - RNA, 23 nt, synthetic construct
  misc_feature 1..23: note = Synthetic
  source 1..23: mol_type = other RNA
ataaaaatggaatactcttggcc

SEQ ID NO: 967 - RNA, 19 nt, synthetic construct
  misc_feature 1..19: note = Synthetic
  source 1..19: mol_type = other RNA
aagagtattccatttttat

SEQ ID NO: 968 - RNA, 21 nt, synthetic construct
  misc_feature 1..21: note = Synthetic
  source 1..21: mol_type = other RNA
ataaaaatggaatactcttgg

SEQ ID NO: 969 - RNA, 21 nt, synthetic construct
  misc_feature 1..21: note = Synthetic
  source 1..21: mol_type = other RNA
ccaagagtattccatttttat

SEQ ID NO: 970 - RNA, 23 nt, synthetic construct
  misc_feature 1..23: note = Synthetic
  source 1..23: mol_type = other RNA
ataaaaatggaatactcttggcc

SEQ ID NO: 971 - RNA, 19 nt, synthetic construct
  misc_feature 1..19: note = Synthetic
  source 1..19: mol_type = other RNA
aagagtattccatttttat

SEQ ID NO: 972 - RNA, 21 nt, synthetic construct
  misc_feature 1..21: note = Synthetic
  source 1..21: mol_type = other RNA
ataaaaatggaatactcttgg

SEQ ID NO: 973 - RNA, 21 nt, synthetic construct
  misc_feature 1..21: note = Synthetic
  source 1..21: mol_type = other RNA
ccaagagtattccatttttat

SEQ ID NO: 974 - RNA, 23 nt, synthetic construct
  misc_feature 1..23: note = Synthetic
  source 1..23: mol_type = other RNA
ataaaaatggaatactcttggcc

SEQ ID NO: 975 - RNA, 19 nt, synthetic construct
  misc_feature 1..19: note = Synthetic
  source 1..19: mol_type = other RNA
aagagtattccatttttat

SEQ ID NO: 976 - RNA, 21 nt, synthetic construct
  misc_feature 1..21: note = Synthetic
  source 1..21: mol_type = other RNA
ataaaaatggaatactcttgg

SEQ ID NO: 977 - RNA, 21 nt, synthetic construct
  misc_feature 1..21: note = Synthetic
  source 1..21: mol_type = other RNA
ccaagagtattccatttttat

SEQ ID NO: 978 - RNA, 23 nt, synthetic construct
  misc_feature 1..23: note = Synthetic
  source 1..23: mol_type = other RNA
ataaaaatggaatactcttggcc

SEQ ID NO: 979 - RNA, 19 nt, synthetic construct
  misc_feature 1..19: note = Synthetic
  source 1..19: mol_type = other RNA
aagagtattccatttttat

SEQ ID NO: 980 - RNA, 21 nt, synthetic construct
  misc_feature 1..21: note = Synthetic
  source 1..21: mol_type = other RNA
ataaaaatggaatactcttgg

SEQ ID NO: 981 - RNA, 21 nt, synthetic construct
  misc_feature 1..21: note = Synthetic
  source 1..21: mol_type = other RNA
ccaagagtattccatttttat

SEQ ID NO: 982 - RNA, 23 nt, synthetic construct
  misc_feature 1..23: note = Synthetic
  source 1..23: mol_type = other RNA
ataaaaatggaatactcttggcc

SEQ ID NO: 983 - RNA, 19 nt, synthetic construct
  misc_feature 1..19: note = Synthetic
  source 1..19: mol_type = other RNA
aagagtattccatttttat

SEQ ID NO: 984 - RNA, 21 nt, synthetic construct
  misc_feature 1..21: note = Synthetic
  source 1..21: mol_type = other RNA
ataaaaatggaatactcttgg

SEQ ID NO: 985 - RNA, 21 nt, synthetic construct
  misc_feature 1..21: note = Synthetic
  source 1..21: mol_type = other RNA
caagagtattccatttttact

SEQ ID NO: 986 - RNA, 23 nt, synthetic construct
  misc_feature 1..23: note = Synthetic
  source 1..23: mol_type = other RNA
agtaaaaatggaatactcttggt

SEQ ID NO: 987 - RNA, 21 nt, synthetic construct
  misc_feature 1..21: note = Synthetic
  source 1..21: mol_type = other RNA
caagagtattccatttttact

SEQ ID NO: 988 - RNA, 23 nt, synthetic construct
  misc_feature 1..23: note = Synthetic
  source 1..23: mol_type = other RNA
agtaaaaatggaatactcttggt

SEQ ID NO: 989 - RNA, 21 nt, synthetic construct
  misc_feature 1..21: note = Synthetic
  source 1..21: mol_type = other RNA
caagagtattccatttttact

SEQ ID NO: 990 - RNA, 23 nt, synthetic construct
  misc_feature 1..23: note = Synthetic
  source 1..23: mol_type = other RNA
agtaaaaatggaatactcttggt

SEQ ID NO: 991 - RNA, 21 nt, synthetic construct
  misc_feature 1..21: note = Synthetic
  source 1..21: mol_type = other RNA
caagagtattccatttttact

SEQ ID NO: 992 - RNA, 23 nt, synthetic construct
  misc_feature 1..23: note = Synthetic
  source 1..23: mol_type = other RNA
agtaaaaatggaatactcttggt

SEQ ID NO: 993 - RNA, 21 nt, synthetic construct
  misc_feature 1..21: note = Synthetic
  source 1..21: mol_type = other RNA
caagagtattccatttttact

SEQ ID NO: 994 - RNA, 23 nt, synthetic construct
  misc_feature 1..23: note = Synthetic
  source 1..23: mol_type = other RNA
agtaaaaatggaatactcttggt

SEQ ID NO: 995 - RNA, 21 nt, synthetic construct
  modified_base 7: mod_base = OTHER; note = thymine
  misc_feature 1..21: note = Synthetic
  source 1..21: mol_type = other RNA
caagagtattccatttttact

SEQ ID NO: 996 - RNA, 23 nt, synthetic construct
  misc_feature 1..23: note = Synthetic
  source 1..23: mol_type = other RNA
agtaaaaatggaatactcttggt

SEQ ID NO: 997 - RNA, 21 nt, synthetic construct
  misc_feature 1..21: note = Synthetic
  source 1..21: mol_type = other RNA
caagagtattccatttttact

SEQ ID NO: 998 - RNA, 23 nt, synthetic construct
  misc_feature 1..23: note = Synthetic
  source 1..23: mol_type = other RNA
agtaaaaatggaatactcttgcc

SEQ ID NO: 999 - RNA, 19 nt, synthetic construct
  misc_feature 1..19: note = Synthetic
  source 1..19: mol_type = other RNA
agagtattccatttttact

SEQ ID NO: 1000 - RNA, 21 nt, synthetic construct
  misc_feature 1..21: note = Synthetic
  source 1..21: mol_type = other RNA
agtaaaaatggaatactcttg

SEQ ID NO: 1001 - RNA, 21 nt, synthetic construct
  misc_feature 1..21: note = Synthetic
  source 1..21: mol_type = other RNA
caagagtattccatttttact

SEQ ID NO: 1002 - RNA, 23 nt, synthetic construct
  modified_base 14: mod_base = OTHER; note = thymine
  misc_feature 1..23: note = Synthetic
  source 1..23: mol_type = other RNA
agtaaaaatggaatactcttggt

SEQ ID NO: 1003 - RNA, 21 nt, synthetic construct
  misc_feature 1..21: note = Synthetic
  source 1..21: mol_type = other RNA
caagagtattccatttttact

SEQ ID NO: 1004 - RNA, 23 nt, synthetic construct
  misc_feature 1..23: note = Synthetic
  source 1..23: mol_type = other RNA
agtaaaaatggaatactcttggt

SEQ ID NO: 1005 - RNA, 21 nt, synthetic construct
  modified_base 7: mod_base = OTHER; note = thymine
  misc_feature 1..21: note = Synthetic
  source 1..21: mol_type = other RNA
caagagtattccatttttact

SEQ ID NO: 1006 - RNA, 23 nt, synthetic construct
  misc_feature 1..23: note = Synthetic
  source 1..23: mol_type = other RNA
agtaaaaatggaatactcttggt

SEQ ID NO: 1007 - RNA, 21 nt, synthetic construct
  misc_feature 1..21: note = Synthetic
  source 1..21: mol_type = other RNA
caagagtattccatttttact

SEQ ID NO: 1008 - RNA, 23 nt, synthetic construct
  misc_feature 1..23: note = Synthetic
  source 1..23: mol_type = other RNA
agtaaaaatggaatactcttggt

SEQ ID NO: 1009 - RNA, 21 nt, synthetic construct
  modified_base 7: mod_base = OTHER; note = thymine
  misc_feature 1..21: note = Synthetic
  source 1..21: mol_type = other RNA
caagagtattccatttttact

SEQ ID NO: 1010 - RNA, 23 nt, synthetic construct
  misc_feature 1..23: note = Synthetic
  source 1..23: mol_type = other RNA
agtaaaaatggaatactcttggt

SEQ ID NO: 1011 - RNA, 21 nt, synthetic construct
  misc_feature 1..21: note = Synthetic
  source 1..21: mol_type = other RNA
caagagtattccatttttact

SEQ ID NO: 1012 - RNA, 23 nt, synthetic construct
  misc_feature 1..23: note = Synthetic
  source 1..23: mol_type = other RNA
agtaaaaatggaatactcttgcc

SEQ ID NO: 1013 - RNA, 19 nt, synthetic construct
  misc_feature 1..19: note = Synthetic
  source 1..19: mol_type = other RNA
agagtattccatttttact

SEQ ID NO: 1014 - RNA, 21 nt, synthetic construct
  misc_feature 1..21: note = Synthetic
  source 1..21: mol_type = other RNA
agtaaaaatggaatactcttg

SEQ ID NO: 1015 - RNA, 21 nt, synthetic construct
  misc_feature 1..21: note = Synthetic
  source 1..21: mol_type = other RNA
caagagtattccatttttact

SEQ ID NO: 1016 - RNA, 23 nt, synthetic construct
  misc_feature 1..23: note = Synthetic
  source 1..23: mol_type = other RNA
agtaaaaatggaatactcttgcc

SEQ ID NO: 1017 - RNA, 19 nt, synthetic construct
  misc_feature 1..19: note = Synthetic
  source 1..19: mol_type = other RNA
agagtattccatttttact

SEQ ID NO: 1018 - RNA, 21 nt, synthetic construct
  misc_feature 1..21: note = Synthetic
  source 1..21: mol_type = other RNA
agtaaaaatggaatactcttg

SEQ ID NO: 1019 - RNA, 21 nt, synthetic construct
  modified_base 7: mod_base = OTHER; note = thymine
  misc_feature 1..21: note = Synthetic
  source 1..21: mol_type = other RNA
caagagtattccatttttact

SEQ ID NO: 1020 - RNA, 23 nt, synthetic construct
  misc_feature 1..23: note = Synthetic
  source 1..23: mol_type = other RNA
agtaaaaatggaatactcttgcc

SEQ ID NO: 1021 - RNA, 19 nt, synthetic construct
  modified_base 5: mod_base = OTHER; note = thymine
  misc_feature 1..19: note = Synthetic
  source 1..19: mol_type = other RNA
agagtattccatttttact

SEQ ID NO: 1022 - RNA, 21 nt, synthetic construct
  misc_feature 1..21: note = Synthetic
  source 1..21: mol_type = other RNA
agtaaaaatggaatactcttg

SEQ ID NO: 1023 - RNA, 21 nt, synthetic construct
  misc_feature 1..21: note = Synthetic
  source 1..21: mol_type = other RNA
caagagtattccatttttact

SEQ ID NO: 1024 - RNA, 23 nt, synthetic construct
  modified_base 14: mod_base = OTHER; note = thymine
  misc_feature 1..23: note = Synthetic
  source 1..23: mol_type = other RNA
agtaaaaatggaatactcttgcc

SEQ ID NO: 1025 - RNA, 19 nt, synthetic construct
  misc_feature 1..19: note = Synthetic
  source 1..19: mol_type = other RNA
agagtattccatttttact

SEQ ID NO: 1026 - RNA, 21 nt, synthetic construct
  modified_base 14: mod_base = OTHER; note = thymine
  misc_feature 1..21: note = Synthetic
  source 1..21: mol_type = other RNA
agtaaaaatggaatactcttg

SEQ ID NO: 1027 - RNA, 21 nt, synthetic construct
  misc_feature 1..21: note = Synthetic
  source 1..21: mol_type = other RNA
agagtattccatttttactaa

SEQ ID NO: 1028 - RNA, 23 nt, synthetic construct
  misc_feature 1..23: note = Synthetic
  source 1..23: mol_type = other RNA
ttagtaaaaatggaatactcttg

SEQ ID NO: 1029 - RNA, 21 nt, synthetic construct
  misc_feature 1..21: note = Synthetic
  source 1..21: mol_type = other RNA
agagtattccatttttactaa

SEQ ID NO: 1030 - RNA, 23 nt, synthetic construct
  misc_feature 1..23: note = Synthetic
  source 1..23: mol_type = other RNA
ttagtaaaaatggaatactcttg

SEQ ID NO: 1031 - RNA, 21 nt, synthetic construct
  misc_feature 1..21: note = Synthetic
  source 1..21: mol_type = other RNA
agagtattccatttttactat

SEQ ID NO: 1032 - RNA, 23 nt, synthetic construct
  misc_feature 1..23: note = Synthetic
  source 1..23: mol_type = other RNA
atagtaaaaatggaatactcttg

SEQ ID NO: 1033 - RNA, 21 nt, synthetic construct
  misc_feature 1..21: note = Synthetic
  source 1..21: mol_type = other RNA
agagtattccatttttactaa

SEQ ID NO: 1034 - RNA, 23 nt, synthetic construct
  modified_base 5: mod_base = OTHER; note = thymine
  misc_feature 1..23: note = Synthetic
  source 1..23: mol_type = other RNA
ttagtaaaaatggaatactcttg

SEQ ID NO: 1035 - RNA, 21 nt, synthetic construct
  misc_feature 1..21: note = Synthetic
  source 1..21: mol_type = other RNA
agagtattccatttttactaa

SEQ ID NO: 1036 - RNA, 23 nt, synthetic construct
  misc_feature 1..23: note = Synthetic
  source 1..23: mol_type = other RNA
ttagtaaaaatggaatactcttg

SEQ ID NO: 1037 - RNA, 21 nt, synthetic construct
  misc_feature 1..21: note = Synthetic
  source 1..21: mol_type = other RNA
agagtattccatttttactaa

SEQ ID NO: 1038 - RNA, 23 nt, synthetic construct
  modified_base 5: mod_base = OTHER; note = thymine
  misc_feature 1..23: note = Synthetic
  source 1..23: mol_type = other RNA
ttagtaaaaatggaatactcttg

SEQ ID NO: 1039 - RNA, 21 nt, synthetic construct
  misc_feature 1..21: note = Synthetic
  source 1..21: mol_type = other RNA
agagtattccatttttactaa

SEQ ID NO: 1040 - RNA, 23 nt, synthetic construct
  misc_feature 1..23: note = Synthetic
  source 1..23: mol_type = other RNA
ttagtaaaaatggaatactcttg

SEQ ID NO: 1041 - RNA, 21 nt, synthetic construct
  misc_feature 1..21: note = Synthetic
  source 1..21: mol_type = other RNA
agagtattccatttttactaa

SEQ ID NO: 1042 - RNA, 23 nt, synthetic construct
  misc_feature 1..23: note = Synthetic
  source 1..23: mol_type = other RNA
ttagtaaaaatggaatactctcc

SEQ ID NO: 1043 - RNA, 19 nt, synthetic construct
  misc_feature 1..19: note = Synthetic
  source 1..19: mol_type = other RNA
agtattccatttttactaa

SEQ ID NO: 1044 - RNA, 21 nt, synthetic construct
  misc_feature 1..21: note = Synthetic
  source 1..21: mol_type = other RNA
ttagtaaaaatggaatactct

SEQ ID NO: 1045 - RNA, 21 nt, synthetic construct
  misc_feature 1..21: note = Synthetic
  source 1..21: mol_type = other RNA
agagtattccatttttactat

SEQ ID NO: 1046 - RNA, 23 nt, synthetic construct
  modified_base 5: mod_base = OTHER; note = thymine
  misc_feature 1..23: note = Synthetic
  source 1..23: mol_type = other RNA
atagtaaaaatggaatactcttg

SEQ ID NO: 1047 - RNA, 21 nt, synthetic construct
  misc_feature 1..21: note = Synthetic
  source 1..21: mol_type = other RNA
agagtattccatttttactat

SEQ ID NO: 1048 - RNA, 23 nt, synthetic construct
  modified_base 5: mod_base = OTHER; note = thymine
  misc_feature 1..23: note = Synthetic
  source 1..23: mol_type = other RNA
atagtaaaaatggaatactcttg

SEQ ID NO: 1049 - RNA, 21 nt, synthetic construct
  misc_feature 1..21: note = Synthetic
  source 1..21: mol_type = other RNA
agagtattccatttttactat

SEQ ID NO: 1050 - RNA, 23 nt, synthetic construct
  modified_base 5: mod_base = OTHER; note = thymine
  misc_feature 1..23: note = Synthetic
  source 1..23: mol_type = other RNA
atagtaaaaatggaatactcttg

SEQ ID NO: 1051 - RNA, 21 nt, synthetic construct
  misc_feature 1..21: note = Synthetic
  source 1..21: mol_type = other RNA
agagtattccatttttactat

SEQ ID NO: 1052 - RNA, 23 nt, synthetic construct
  modified_base 5: mod_base = OTHER; note = thymine
  misc_feature 1..23: note = Synthetic
  source 1..23: mol_type = other RNA
atagtaaaaatggaatactcttg

SEQ ID NO: 1053 - RNA, 21 nt, synthetic construct
  misc_feature 1..21: note = Synthetic
  source 1..21: mol_type = other RNA
agagtattccatttttactat

SEQ ID NO: 1054 - RNA, 23 nt, synthetic construct
  modified_base 5: mod_base = OTHER; note = thymine
  misc_feature 1..23: note = Synthetic
  source 1..23: mol_type = other RNA
atagtaaaaatggaatactcttg

SEQ ID NO: 1055 - RNA, 21 nt, synthetic construct
  misc_feature 1..21: note = Synthetic
  source 1..21: mol_type = other RNA
agagtattccatttttactat

SEQ ID NO: 1056 - RNA, 23 nt, synthetic construct
  modified_base 5: mod_base = OTHER; note = thymine
  misc_feature 1..23: note = Synthetic
  source 1..23: mol_type = other RNA
atagtaaaaatggaatactcttg

SEQ ID NO: 1057 - RNA, 21 nt, synthetic construct
  misc_feature 1..21: note = Synthetic
  source 1..21: mol_type = other RNA
agagtattccatttttactat

SEQ ID NO: 1058 - RNA, 23 nt, synthetic construct
  modified_base 5: mod_base = OTHER; note = thymine
  misc_feature 1..23: note = Synthetic
  source 1..23: mol_type = other RNA
atagtaaaaatggaatactcttg

SEQ ID NO: 1059 - RNA, 21 nt, synthetic construct
  misc_feature 1..21: note = Synthetic
  source 1..21: mol_type = other RNA
agagtattccatttttactat

SEQ ID NO: 1060 - RNA, 23 nt, synthetic construct
  modified_base 5: mod_base = OTHER; note = thymine
  misc_feature 1..23: note = Synthetic
  source 1..23: mol_type = other RNA
atagtaaaaatggaatactcttg

SEQ ID NO: 1061 - RNA, 21 nt, synthetic construct
  misc_feature 1..21: note = Synthetic
  source 1..21: mol_type = other RNA
agagtattccatttttactat

SEQ ID NO: 1062 - RNA, 23 nt, synthetic construct
  modified_base 5: mod_base = OTHER; note = thymine
  misc_feature 1..23: note = Synthetic
  source 1..23: mol_type = other RNA
atagtaaaaatggaatactcttg

SEQ ID NO: 1063 - RNA, 21 nt, synthetic construct
  misc_feature 1..21: note = Synthetic
  source 1..21: mol_type = other RNA
agagtattccatttttactat

SEQ ID NO: 1064 - RNA, 23 nt, synthetic construct
  modified_base 5: mod_base = OTHER; note = thymine
  misc_feature 1..23: note = Synthetic
  source 1..23: mol_type = other RNA
atagtaaaaatggaatactcttg

SEQ ID NO: 1065 - RNA, 21 nt, synthetic construct
  misc_feature 1..21: note = Synthetic
  source 1..21: mol_type = other RNA
agagtattccatttttactat

SEQ ID NO: 1066 - RNA, 23 nt, synthetic construct
  modified_base 5: mod_base = OTHER; note = thymine
  misc_feature 1..23: note = Synthetic
  source 1..23: mol_type = other RNA
atagtaaaaatggaatactcttg

SEQ ID NO: 1067 - RNA, 21 nt, synthetic construct
  misc_feature 1..21: note = Synthetic
  source 1..21: mol_type = other RNA
agagtattccatttttactat

SEQ ID NO: 1068 - RNA, 23 nt, synthetic construct
  modified_base 5: mod_base = OTHER; note = thymine
  misc_feature 1..23: note = Synthetic
  source 1..23: mol_type = other RNA
atagtaaaaatggaatactcttg

SEQ ID NO: 1069 - RNA, 21 nt, synthetic construct
  misc_feature 1..21: note = Synthetic
  source 1..21: mol_type = other RNA
agagtattccatttttactat

SEQ ID NO: 1070 - RNA, 23 nt, synthetic construct
  modified_base 5: mod_base = OTHER; note = thymine
  misc_feature 1..23: note = Synthetic
  source 1..23: mol_type = other RNA
atagtaaaaatggaatactctcc

SEQ ID NO: 1071 - RNA, 21 nt, synthetic construct
  misc_feature 1..21: note = Synthetic
  source 1..21: mol_type = other RNA
agagtattccatttttactat

SEQ ID NO: 1072 - RNA, 23 nt, synthetic construct
  modified_base 5: mod_base = OTHER; note = thymine
  misc_feature 1..23: note = Synthetic
  source 1..23: mol_type = other RNA
atagtaaaaatggaatactctcc

SEQ ID NO: 1073 - RNA, 21 nt, synthetic construct
  misc_feature 1..21: note = Synthetic
  source 1..21: mol_type = other RNA
agagtattccatttttactat

SEQ ID NO: 1074 - RNA, 23 nt, synthetic construct
  modified_base 5: mod_base = OTHER; note = thymine
  misc_feature 1..23: note = Synthetic
  source 1..23: mol_type = other RNA
atagtaaaaatggaatactctcc

SEQ ID NO: 1075 - RNA, 21 nt, synthetic construct
  misc_feature 1..21: note = Synthetic
  source 1..21: mol_type = other RNA
agagtattccatttttactat

SEQ ID NO: 1076 - RNA, 23 nt, synthetic construct
  modified_base 5: mod_base = OTHER; note = thymine
  misc_feature 1..23: note = Synthetic
  source 1..23: mol_type = other RNA
atagtaaaaatggaatactctcc

SEQ ID NO: 1077 - RNA, 19 nt, synthetic construct
  misc_feature 1..19: note = Synthetic
  source 1..19: mol_type = other RNA
agtattccatttttactat

SEQ ID NO: 1078 - RNA, 21 nt, synthetic construct
  modified_base 5: mod_base = OTHER; note = thymine
  misc_feature 1..21: note = Synthetic
  source 1..21: mol_type = other RNA
atagtaaaaatggaatactct

SEQ ID NO: 1079 - RNA, 19 nt, synthetic construct
  misc_feature 1..19: note = Synthetic
  source 1..19: mol_type = other RNA
agtattccatttttactat

SEQ ID NO: 1080 - RNA, 21 nt, synthetic construct
  modified_base 5: mod_base = OTHER; note = thymine
  misc_feature 1..21: note = Synthetic
  source 1..21: mol_type = other RNA
atagtaaaaatggaatactct

SEQ ID NO: 1081 - RNA, 19 nt, synthetic construct
  misc_feature 1..19: note = Synthetic
  source 1..19: mol_type = other RNA
agtattccatttttactat

SEQ ID NO: 1082 - RNA, 21 nt, synthetic construct
  modified_base 5: mod_base = OTHER; note = thymine
  misc_feature 1..21: note = Synthetic
  source 1..21: mol_type = other RNA
atagtaaaaatggaatactct

SEQ ID NO: 1083 - RNA, 19 nt, synthetic construct
  misc_feature 1..19: note = Synthetic
  source 1..19: mol_type = other RNA
agtattccatttttactat

SEQ ID NO: 1084 - RNA, 21 nt, synthetic construct
  modified_base 5: mod_base = OTHER; note = thymine
  misc_feature 1..21: note = Synthetic
  source 1..21: mol_type = other RNA
atagtaaaaatggaatactct

SEQ ID NO: 1085 - RNA, 21 nt, synthetic construct
  misc_feature 1..21: note = Synthetic
  source 1..21: mol_type = other RNA
agagtattccatttttactaa

SEQ ID NO: 1086 - RNA, 23 nt, synthetic construct
  misc_feature 1..23: note = Synthetic
  source 1..23: mol_type = other RNA
ttagtaaaaatggaatactcttg

SEQ ID NO: 1087 - RNA, 21 nt, synthetic construct
  misc_feature 1..21: note = Synthetic
  source 1..21: mol_type = other RNA
ctaaagcagtgttttcaccta

SEQ ID NO: 1088 - RNA, 23 nt, synthetic construct
  modified_base 5: mod_base = OTHER; note = thymine
  misc_feature 1..23: note = Synthetic
  source 1..23: mol_type = other RNA
taggtgaaaacactgctttagta

SEQ ID NO: 1089 - RNA, 21 nt, synthetic construct
  misc_feature 1..21: note = Synthetic
  source 1..21: mol_type = other RNA
ctaaagcagtgttttcaccta

SEQ ID NO: 1090 - RNA, 23 nt, synthetic construct
  modified_base 5: mod_base = OTHER; note = thymine
  misc_feature 1..23: note = Synthetic
  source 1..23: mol_type = other RNA
taggtgaaaacactgctttagta

SEQ ID NO: 1091 - RNA, 21 nt, synthetic construct
  misc_feature 1..21: note = Synthetic
  source 1..21: mol_type = other RNA
ctaaagcagtgttttcaccta

SEQ ID NO: 1092 - RNA, 23 nt, synthetic construct
  modified_base 5: mod_base = OTHER; note = thymine
  misc_feature 1..23: note = Synthetic
  source 1..23: mol_type = other RNA
taggtgaaaacactgctttagta

SEQ ID NO: 1093 - RNA, 21 nt, synthetic construct
  misc_feature 1..21: note = Synthetic
  source 1..21: mol_type = other RNA
ctaaagcagtgttttcacctt

SEQ ID NO: 1094 - RNA, 23 nt, synthetic construct
  modified_base 5: mod_base = OTHER; note = thymine
  misc_feature 1..23: note = Synthetic
  source 1..23: mol_type = other RNA
aaggtgaaaacactgctttagta

SEQ ID NO: 1095 - RNA, 21 nt, synthetic construct
  misc_feature 1..21: note = Synthetic
  source 1..21: mol_type = other RNA
ctaaagcagtgttttcaccta

SEQ ID NO: 1096 - RNA, 23 nt, synthetic construct
  modified_base 5: mod_base = OTHER; note = thymine
  misc_feature 1..23: note = Synthetic
  source 1..23: mol_type = other RNA
taggtgaaaacactgctttagta

SEQ ID NO: 1097 - RNA, 21 nt, synthetic construct
  misc_feature 1..21: note = Synthetic
  source 1..21: mol_type = other RNA
ctaaagcagtgttttcaccta

SEQ ID NO: 1098 - RNA, 23 nt, synthetic construct
  modified_base 5: mod_base = OTHER; note = thymine
  misc_feature 1..23: note = Synthetic
  source 1..23: mol_type = other RNA
taggtgaaaacactgctttagcc

SEQ ID NO: 1099 - RNA, 19 nt, synthetic construct
  misc_feature 1..19: note = Synthetic
  source 1..19: mol_type = other RNA
aaagcagtgttttcaccta

SEQ ID NO: 1100 - RNA, 21 nt, synthetic construct
  modified_base 5: mod_base = OTHER; note = thymine
  misc_feature 1..21: note = Synthetic
  source 1..21: mol_type = other RNA
taggtgaaaacactgctttag

SEQ ID NO: 1101 - RNA, 21 nt, synthetic construct
  misc_feature 1..21: note = Synthetic
  source 1..21: mol_type = other RNA
ctaaagcagtgttttcaccta

SEQ ID NO: 1102 - RNA, 23 nt, synthetic construct
  modified_base 5: mod_base = OTHER; note = thymine
  misc_feature 1..23: note = Synthetic
  source 1..23: mol_type = other RNA
aaggtgaaaacactgctttagta

SEQ ID NO: 1103 - RNA, 21 nt, synthetic construct
  misc_feature 1..21: note = Synthetic
  source 1..21: mol_type = other RNA
ctaaagcagtgttttcaccta

SEQ ID NO: 1104 - RNA, 23 nt, synthetic construct
  modified_base 5: mod_base = OTHER; note = thymine
  misc_feature 1..23: note = Synthetic
  source 1..23: mol_type = other RNA
aaggtgaaaacactgctttagta

SEQ ID NO: 1105 - RNA, 21 nt, synthetic construct
  misc_feature 1..21: note = Synthetic
  source 1..21: mol_type = other RNA
ctaaagcagtgttttcaccta

SEQ ID NO: 1106 - RNA, 23 nt, synthetic construct
  modified_base 5: mod_base = OTHER; note = thymine
  misc_feature 1..23: note = Synthetic
  source 1..23: mol_type = other RNA
aaggtgaaaacactgctttagcc

SEQ ID NO: 1107 - RNA, 21 nt, synthetic construct
  misc_feature 1..21: note = Synthetic
  source 1..21: mol_type = other RNA
ctaaagcagtgttttcaccta

SEQ ID NO: 1108 - RNA, 23 nt, synthetic construct
  modified_base 5: mod_base = OTHER; note = thymine
  misc_feature 1..23: note = Synthetic
  source 1..23: mol_type = other RNA
aaggtgaaaacactgctttagcc

SEQ ID NO: 1109 - RNA, 19 nt, synthetic construct
  misc_feature 1..19: note = Synthetic
  source 1..19: mol_type = other RNA
aaagcagtgttttcaccta

SEQ ID NO: 1110 - RNA, 21 nt, synthetic construct
  modified_base 5: mod_base = OTHER; note = thymine
  misc_feature 1..21: note = Synthetic
  source 1..21: mol_type = other RNA
aaggtgaaaacactgctttag

SEQ ID NO: 1111 - RNA, 19 nt, synthetic construct
  misc_feature 1..19: note = Synthetic
  source 1..19: mol_type = other RNA
aaagcagtgttttcaccta

SEQ ID NO: 1112 - RNA, 21 nt, synthetic construct
  modified_base 5: mod_base = OTHER; note = thymine
  misc_feature 1..21: note = Synthetic
  source 1..21: mol_type = other RNA
aaggtgaaaacactgctttag

SEQ ID NO: 1113 - RNA, 21 nt, synthetic construct
  misc_feature 1..21: note = Synthetic
  modified_base 1: mod_base = OTHER; note = 2'-O-methylcytidine-3'-phosphorothioate
  modified_base 2: mod_base = OTHER; note = 2'-O-methylcytidine-3'-phosphorothioate
  modified_base 7: mod_base = OTHER; note = 2'-fluoroguanosine-3'-phosphate
  modified_base 9: mod_base = OTHER; note = 2'-fluoroadenosine-3'-phosphate
  modified_base 10: mod_base = OTHER; note = 2'-fluorouridine-3'-phosphate
  modified_base 11: mod_base = OTHER; note = 2'-fluorouridine-3'-phosphate
  modified_base 21: mod_base = OTHER; note = L96
  source 1..21: mol_type = other RNA
ccaagagtattccatttttat

SEQ ID NO: 1114 - RNA, 23 nt, synthetic construct
  misc_feature 1..23: note = Synthetic
  modified_base 1: mod_base = OTHER; note = 2'-O-methyladenosine-3'-phosphorothioate
  modified_base 2: mod_base = OTHER; note = 2'-fluorouridine -3'-phosphorothioate
  modified_base 6: mod_base = OTHER; note = 2'-fluoroadenosine-3'-phosphate
  modified_base 14: mod_base = OTHER; note = 2'-fluoroadenosine-3'-phosphate
  modified_base 16: mod_base = OTHER; note = 2'-fluorouridine-3'-phosphate
  modified_base 21: mod_base = OTHER; note = 2'-O-methylguanosine-3'- phosphorothioate
  modified_base 22: mod_base = OTHER; note = 2'-O-methyluridine-3'- phosphorothioate
  source 1..23: mol_type = other RNA
ataaaaatggaatactcttggtt

SEQ ID NO: 1115 - RNA, 23 nt, synthetic construct
  misc_feature 1..23: note = Synthetic
  source 1..23: mol_type = other RNA
aaccaagagtattccatttttac

SEQ ID NO: 1116 - RNA, 21 nt, synthetic construct
  misc_feature 1..21: note = Synthetic
  modified_base 1: mod_base = OTHER; note = 2'-O-methylcytidine-3'-phosphorothioate
  modified_base 2: mod_base = OTHER; note = 2'-O-methylcytidine-3'-phosphorothioate
  modified_base 9: mod_base = OTHER; note = 2'-fluoroadenosine-3'-phosphate
  modified_base 10: mod_base = OTHER; note = 2'-fluorouridine-3'-phosphate
  modified_base 11: mod_base = OTHER; note = 2'-fluorouridine-3'-phosphate
  modified_base 21: mod_base = OTHER; note = L96
  source 1..21: mol_type = other RNA
ccaagagtattccatttttat

SEQ ID NO: 1117 - RNA, 23 nt, synthetic construct
  misc_feature 1..23: note = Synthetic
  modified_base 1: mod_base = OTHER; note = 2'-O-methyladenosine-3'-phosphorothioate
  modified_base 2: mod_base = OTHER; note = 2'-fluorouridine -3'-phosphorothioate
  modified_base 6: mod_base = OTHER; note = 2'-fluoroadenosine-3'-phosphate
  modified_base 14: mod_base = OTHER; note = 2'-fluoroadenosine-3'-phosphate
  modified_base 16: mod_base = OTHER; note = 2'-fluorouridine-3'-phosphate
  modified_base 21: mod_base = OTHER; note = 2'-O-methylguanosine-3'- phosphorothioate
  modified_base 22: mod_base = OTHER; note = 2'-O-methyluridine-3'- phosphorothioate
  source 1..23: mol_type = other RNA
ataaaaatggaatactcttggtt

SEQ ID NO: 1118 - RNA, 23 nt, synthetic construct
  misc_feature 1..23: note = Synthetic
  source 1..23: mol_type = other RNA
aaccaagagtattccatttttac

SEQ ID NO: 1119 - RNA, 21 nt, synthetic construct
  misc_feature 1..21: note = Synthetic
  modified_base 1: mod_base = OTHER; note = 2'-O-methylcytidine-3'-phosphorothioate
  modified_base 2: mod_base = OTHER; note = 2'-O-methylcytidine-3'-phosphorothioate
  modified_base 7: mod_base = OTHER; note = 2`-deoxyguanosine-3`-phosphate
  modified_base 9: mod_base = OTHER; note = 2'-fluoroadenosine-3'-phosphate
  modified_base 10: mod_base = OTHER; note = 2'-fluorouridine-3'-phosphate
  modified_base 11: mod_base = OTHER; note = 2'-fluorouridine-3'-phosphate
  modified_base 21: mod_base = OTHER; note = L96
  source 1..21: mol_type = other RNA
ccaagagtattccatttttat

SEQ ID NO: 1120 - RNA, 23 nt, synthetic construct
  misc_feature 1..23: note = Synthetic
  modified_base 1: mod_base = OTHER; note = 2'-O-methyladenosine-3'-phosphorothioate
  modified_base 2: mod_base = OTHER; note = 2'-fluorouridine -3'-phosphorothioate
  modified_base 6: mod_base = OTHER; note = 2'-fluoroadenosine-3'-phosphate
  modified_base 14: mod_base = OTHER; note = 2'-fluoroadenosine-3'-phosphate
  modified_base 16: mod_base = OTHER; note = 2'-fluorouridine-3'-phosphate
  modified_base 21: mod_base = OTHER; note = 2'-O-methylguanosine-3'- phosphorothioate
  modified_base 22: mod_base = OTHER; note = 2'-O-methyluridine-3'- phosphorothioate
  source 1..23: mol_type = other RNA
ataaaaatggaatactcttggtt

SEQ ID NO: 1121 - RNA, 23 nt, synthetic construct
  misc_feature 1..23: note = Synthetic
  source 1..23: mol_type = other RNA
aaccaagagtattccatttttac

SEQ ID NO: 1122 - RNA, 21 nt, synthetic construct
  misc_feature 1..21: note = Synthetic
  modified_base 1: mod_base = OTHER; note = 2'-O-methylcytidine-3'-phosphorothioate
  modified_base 2: mod_base = OTHER; note = 2'-O-methylcytidine-3'-phosphorothioate
  modified_base 9: mod_base = OTHER; note = 2`-deoxyadenosine-3`-phosphate
  modified_base 10: mod_base = OTHER; note = 2'-fluorouridine-3'-phosphate
  modified_base 11: mod_base = OTHER; note = 2'-fluorouridine-3'-phosphate
  modified_base 21: mod_base = OTHER; note = L96
  source 1..21: mol_type = other RNA
ccaagagtattccatttttat

SEQ ID NO: 1123 - RNA, 23 nt, synthetic construct
  misc_feature 1..23: note = Synthetic
  modified_base 1: mod_base = OTHER; note = 2'-O-methyladenosine-3'-phosphorothioate
  modified_base 2: mod_base = OTHER; note = 2'-fluorouridine -3'-phosphorothioate
  modified_base 6: mod_base = OTHER; note = 2'-fluoroadenosine-3'-phosphate
  modified_base 14: mod_base = OTHER; note = 2'-fluoroadenosine-3'-phosphate
  modified_base 16: mod_base = OTHER; note = 2'-fluorouridine-3'-phosphate
  modified_base 21: mod_base = OTHER; note = 2'-O-methylguanosine-3'- phosphorothioate
  modified_base 22: mod_base = OTHER; note = 2'-O-methyluridine-3'- phosphorothioate
  source 1..23: mol_type = other RNA
ataaaaatggaatactcttggtt

SEQ ID NO: 1124 - RNA, 23 nt, synthetic construct
  misc_feature 1..23: note = Synthetic
  source 1..23: mol_type = other RNA
aaccaagagtattccatttttac

SEQ ID NO: 1125 - RNA, 21 nt, synthetic construct
  misc_feature 1..21: note = Synthetic
  modified_base 1: mod_base = OTHER; note = 2'-O-methylcytidine-3'-phosphorothioate
  modified_base 2: mod_base = OTHER; note = 2'-O-methylcytidine-3'-phosphorothioate
  modified_base 7: mod_base = OTHER; note = 2`-deoxyguanosine-3`-phosphate
  modified_base 9: mod_base = OTHER; note = 2`-deoxyadenosine-3`-phosphate
  modified_base 10: mod_base = OTHER; note = 2'-fluorouridine-3'-phosphate
  modified_base 11: mod_base = OTHER; note = 2'-fluorouridine-3'-phosphate
  modified_base 21: mod_base = OTHER; note = L96
  source 1..21: mol_type = other RNA
ccaagagtattccatttttat

SEQ ID NO: 1126 - RNA, 23 nt, synthetic construct
  misc_feature 1..23: note = Synthetic
  modified_base 1: mod_base = OTHER; note = 2'-O-methyladenosine-3'-phosphorothioate
  modified_base 2: mod_base = OTHER; note = 2'-fluorouridine -3'-phosphorothioate
  modified_base 6: mod_base = OTHER; note = 2'-fluoroadenosine-3'-phosphate
  modified_base 14: mod_base = OTHER; note = 2'-fluoroadenosine-3'-phosphate
  modified_base 16: mod_base = OTHER; note = 2'-fluorouridine-3'-phosphate
  modified_base 21: mod_base = OTHER; note = 2'-O-methylguanosine-3'- phosphorothioate
  modified_base 22: mod_base = OTHER; note = 2'-O-methyluridine-3'- phosphorothioate
  source 1..23: mol_type = other RNA
ataaaaatggaatactcttggtt

SEQ ID NO: 1127 - RNA, 23 nt, synthetic construct
  misc_feature 1..23: note = Synthetic
  source 1..23: mol_type = other RNA
aaccaagagtattccatttttac

SEQ ID NO: 1128 - RNA, 21 nt, synthetic construct
  misc_feature 1..21: note = Synthetic
  modified_base 1: mod_base = OTHER; note = 2'-O-methylcytidine-3'-phosphorothioate
  modified_base 2: mod_base = OTHER; note = 2'-O-methylcytidine-3'-phosphorothioate
  modified_base 7: mod_base = OTHER; note = 2'-fluoroguanosine-3'-phosphate
  modified_base 9: mod_base = OTHER; note = 2'-fluoroadenosine-3'-phosphate
  modified_base 10: mod_base = OTHER; note = 2'-fluorouridine-3'-phosphate
  modified_base 11: mod_base = OTHER; note = 2'-fluorouridine-3'-phosphate
  modified_base 21: mod_base = OTHER; note = L96
  source 1..21: mol_type = other RNA
ccaagagtattccatttttat

SEQ ID NO: 1129 - RNA, 23 nt, synthetic construct
  misc_feature 1..23: note = Synthetic
  modified_base 1: mod_base = OTHER; note = 2'-O-methyladenosine-3'-phosphorothioate
  modified_base 2: mod_base = OTHER; note = 2'-fluorouridine -3'-phosphorothioate
  modified_base 5: mod_base = OTHER; note = 2`-deoxyadenosine-3`-phosphate
  modified_base 7: mod_base = OTHER; note = 2`-deoxyadenosine-3`-phosphate
  modified_base 14: mod_base = OTHER; note = 2'-fluoroadenosine-3'-phosphate
  modified_base 16: mod_base = OTHER; note = 2'-fluorouridine-3'-phosphate
  modified_base 21: mod_base = OTHER; note = 2'-O-methylguanosine-3'- phosphorothioate
  modified_base 22: mod_base = OTHER; note = 2'-O-methyluridine-3'- phosphorothioate
  source 1..23: mol_type = other RNA
ataaaaatggaatactcttggtt

SEQ ID NO: 1130 - RNA, 23 nt, synthetic construct
  misc_feature 1..23: note = Synthetic
  source 1..23: mol_type = other RNA
aaccaagagtattccatttttac

SEQ ID NO: 1131 - RNA, 21 nt, synthetic construct
  misc_feature 1..21: note = Synthetic
  modified_base 1: mod_base = OTHER; note = 2'-O-methylcytidine-3'-phosphorothioate
  modified_base 2: mod_base = OTHER; note = 2'-O-methylcytidine-3'-phosphorothioate
  modified_base 7: mod_base = OTHER; note = 2'-fluoroguanosine-3'-phosphate
  modified_base 9: mod_base = OTHER; note = 2'-fluoroadenosine-3'-phosphate
  modified_base 10: mod_base = OTHER; note = 2'-fluorouridine-3'-phosphate
  modified_base 11: mod_base = OTHER; note = 2'-fluorouridine-3'-phosphate
  modified_base 21: mod_base = OTHER; note = L96
  source 1..21: mol_type = other RNA
ccaagagtattccatttttat

SEQ ID NO: 1132 - RNA, 23 nt, synthetic construct
  misc_feature 1..23: note = Synthetic
  modified_base 1: mod_base = OTHER; note = 2'-O-methyladenosine-3'-phosphorothioate
  modified_base 2: mod_base = OTHER; note = 2'-fluorouridine -3'-phosphorothioate
  modified_base 6: mod_base = OTHER; note = 2'-fluoroadenosine-3'-phosphate
  modified_base 14: mod_base = OTHER; note = 2'-fluoroadenosine-3'-phosphate
  modified_base 16: mod_base = OTHER; note = 2'-fluorouridine-3'-phosphate
  modified_base 21: mod_base = OTHER; note = 2'-O-methylguanosine-3'- phosphorothioate
  modified_base 22: mod_base = OTHER; note = 2'-O-methyluridine-3'- phosphorothioate
  source 1..23: mol_type = other RNA
ataaaaatggaatactcttggtt

SEQ ID NO: 1133 - RNA, 23 nt, synthetic construct
  misc_feature 1..23: note = Synthetic
  source 1..23: mol_type = other RNA
aaccaagagtattccatttttac

SEQ ID NO: 1134 - RNA, 21 nt, synthetic construct
  misc_feature 1..21: note = Synthetic
  modified_base 1: mod_base = OTHER; note = 2'-O-methylcytidine-3'-phosphorothioate
  modified_base 2: mod_base = OTHER; note = 2'-O-methylcytidine-3'-phosphorothioate
  modified_base 7: mod_base = OTHER; note = 2'-fluoroguanosine-3'-phosphate
  modified_base 9: mod_base = OTHER; note = 2'-fluoroadenosine-3'-phosphate
  modified_base 10: mod_base = OTHER; note = 2'-fluorouridine-3'-phosphate
  modified_base 11: mod_base = OTHER; note = 2'-fluorouridine-3'-phosphate
  modified_base 21: mod_base = OTHER; note = L96
  source 1..21: mol_type = other RNA
ccaagagtattccatttttat

SEQ ID NO: 1135 - RNA, 23 nt, synthetic construct
  misc_feature 1..23: note = Synthetic
  modified_base 1: mod_base = OTHER; note = 2'-O-methyladenosine-3'-phosphorothioate
  modified_base 2: mod_base = OTHER; note = 2'-fluorouridine -3'-phosphorothioate
  modified_base 5: mod_base = OTHER; note = 2`-deoxyadenosine-3`-phosphate
  modified_base 7: mod_base = OTHER; note = 2`-deoxyadenosine-3`-phosphate
  modified_base 14: mod_base = OTHER; note = 2`-deoxyadenosine-3`-phosphate
  modified_base 16: mod_base = OTHER; note = 2'-fluorouridine-3'-phosphate
  modified_base 21: mod_base = OTHER; note = 2'-O-methylguanosine-3'- phosphorothioate
  modified_base 22: mod_base = OTHER; note = 2'-O-methyluridine-3'- phosphorothioate
  source 1..23: mol_type = other RNA
ataaaaatggaatactcttggtt

SEQ ID NO: 1136 - RNA, 23 nt, synthetic construct
  misc_feature 1..23: note = Synthetic
  source 1..23: mol_type = other RNA
aaccaagagtattccatttttac

SEQ ID NO: 1137 - RNA, 21 nt, synthetic construct
  misc_feature 1..21: note = Synthetic
  modified_base 1: mod_base = OTHER; note = 2'-O-methylcytidine-3'-phosphorothioate
  modified_base 2: mod_base = OTHER; note = 2'-O-methylcytidine-3'-phosphorothioate
  modified_base 9: mod_base = OTHER; note = 2'-fluoroadenosine-3'-phosphate
  modified_base 10: mod_base = OTHER; note = 2'-fluorouridine-3'-phosphate
  modified_base 11: mod_base = OTHER; note = 2'-fluorouridine-3'-phosphate
  modified_base 21: mod_base = OTHER; note = L96
  source 1..21: mol_type = other RNA
ccaagagtattccatttttat

SEQ ID NO: 1138 - RNA, 23 nt, synthetic construct
  misc_feature 1..23: note = Synthetic
  modified_base 1: mod_base = OTHER; note = 2'-O-methyladenosine-3'-phosphorothioate
  modified_base 2: mod_base = OTHER; note = 2'-fluorouridine -3'-phosphorothioate
  modified_base 5: mod_base = OTHER; note = 2`-deoxyadenosine-3`-phosphate
  modified_base 7: mod_base = OTHER; note = 2`-deoxyadenosine-3`-phosphate
  modified_base 14: mod_base = OTHER; note = 2'-fluoroadenosine-3'-phosphate
  modified_base 16: mod_base = OTHER; note = 2'-fluorouridine-3'-phosphate
  modified_base 21: mod_base = OTHER; note = 2'-O-methylguanosine-3'- phosphorothioate
  modified_base 22: mod_base = OTHER; note = 2'-O-methyluridine-3'- phosphorothioate
  source 1..23: mol_type = other RNA
ataaaaatggaatactcttggtt

SEQ ID NO: 1139 - RNA, 23 nt, synthetic construct
  misc_feature 1..23: note = Synthetic
  source 1..23: mol_type = other RNA
aaccaagagtattccatttttac

SEQ ID NO: 1140 - RNA, 21 nt, synthetic construct
  misc_feature 1..21: note = Synthetic
  modified_base 1: mod_base = OTHER; note = 2'-O-methylcytidine-3'-phosphorothioate
  modified_base 2: mod_base = OTHER; note = 2'-O-methylcytidine-3'-phosphorothioate
  modified_base 7: mod_base = OTHER; note = 2`-deoxyguanosine-3`-phosphate
  modified_base 9: mod_base = OTHER; note = 2'-fluoroadenosine-3'-phosphate
  modified_base 10: mod_base = OTHER; note = 2'-fluorouridine-3'-phosphate
  modified_base 11: mod_base = OTHER; note = 2'-fluorouridine-3'-phosphate
  modified_base 21: mod_base = OTHER; note = L96
  source 1..21: mol_type = other RNA
ccaagagtattccatttttat

SEQ ID NO: 1141 - RNA, 23 nt, synthetic construct
  misc_feature 1..23: note = Synthetic
  modified_base 1: mod_base = OTHER; note = 2'-O-methyladenosine-3'-phosphorothioate
  modified_base 2: mod_base = OTHER; note = 2'-fluorouridine -3'-phosphorothioate
  modified_base 5: mod_base = OTHER; note = 2`-deoxyadenosine-3`-phosphate
  modified_base 7: mod_base = OTHER; note = 2`-deoxyadenosine-3`-phosphate
  modified_base 14: mod_base = OTHER; note = 2'-fluoroadenosine-3'-phosphate
  modified_base 16: mod_base = OTHER; note = 2'-fluorouridine-3'-phosphate
  modified_base 21: mod_base = OTHER; note = 2'-O-methylguanosine-3'- phosphorothioate
  modified_base 22: mod_base = OTHER; note = 2'-O-methyluridine-3'- phosphorothioate
  source 1..23: mol_type = other RNA
ataaaaatggaatactcttggtt

SEQ ID NO: 1142 - RNA, 23 nt, synthetic construct
  misc_feature 1..23: note = Synthetic
  source 1..23: mol_type = other RNA
aaccaagagtattccatttttac

SEQ ID NO: 1143 - RNA, 21 nt, synthetic construct
  misc_feature 1..21: note = Synthetic
  modified_base 1: mod_base = OTHER; note = 2'-O-methylcytidine-3'-phosphorothioate
  modified_base 2: mod_base = OTHER; note = 2'-O-methylcytidine-3'-phosphorothioate
  modified_base 9: mod_base = OTHER; note = 2'-fluoroadenosine-3'-phosphate
  modified_base 10: mod_base = OTHER; note = 2'-fluorouridine-3'-phosphate
  modified_base 11: mod_base = OTHER; note = 2'-fluorouridine-3'-phosphate
  modified_base 21: mod_base = OTHER; note = L96
  source 1..21: mol_type = other RNA
ccaagagtattccatttttat

SEQ ID NO: 1144 - RNA, 23 nt, synthetic construct
  misc_feature 1..23: note = Synthetic
  modified_base 1: mod_base = OTHER; note = 2'-O-methyladenosine-3'-phosphorothioate
  modified_base 2: mod_base = OTHER; note = 2'-fluorouridine -3'-phosphorothioate
  modified_base 5: mod_base = OTHER; note = 2`-deoxyadenosine-3`-phosphate
  modified_base 7: mod_base = OTHER; note = 2`-deoxyadenosine-3`-phosphate
  modified_base 14: mod_base = OTHER; note = 2`-deoxyadenosine-3`-phosphate
  modified_base 16: mod_base = OTHER; note = 2'-fluorouridine-3'-phosphate
  modified_base 21: mod_base = OTHER; note = 2'-O-methylguanosine-3'- phosphorothioate
  modified_base 22: mod_base = OTHER; note = 2'-O-methyluridine-3'- phosphorothioate
  source 1..23: mol_type = other RNA
ataaaaatggaatactcttggtt

SEQ ID NO: 1145 - RNA, 23 nt, synthetic construct
  misc_feature 1..23: note = Synthetic
  source 1..23: mol_type = other RNA
aaccaagagtattccatttttac

SEQ ID NO: 1146 - RNA, 21 nt, synthetic construct
  misc_feature 1..21: note = Synthetic
  modified_base 1: mod_base = OTHER; note = 2'-O-methylcytidine-3'-phosphorothioate
  modified_base 2: mod_base = OTHER; note = 2'-O-methylcytidine-3'-phosphorothioate
  modified_base 7: mod_base = OTHER; note = 2`-deoxyguanosine-3`-phosphate
  modified_base 9: mod_base = OTHER; note = 2'-fluoroadenosine-3'-phosphate
  modified_base 10: mod_base = OTHER; note = 2'-fluorouridine-3'-phosphate
  modified_base 11: mod_base = OTHER; note = 2'-fluorouridine-3'-phosphate
  modified_base 21: mod_base = OTHER; note = L96
  source 1..21: mol_type = other RNA
ccaagagtattccatttttat

SEQ ID NO: 1147 - RNA, 23 nt, synthetic construct
  misc_feature 1..23: note = Synthetic
  modified_base 1: mod_base = OTHER; note = 2'-O-methyladenosine-3'-phosphorothioate
  modified_base 2: mod_base = OTHER; note = 2'-fluorouridine -3'-phosphorothioate
  modified_base 5: mod_base = OTHER; note = 2`-deoxyadenosine-3`-phosphate
  modified_base 7: mod_base = OTHER; note = 2`-deoxyadenosine-3`-phosphate
  modified_base 14: mod_base = OTHER; note = 2`-deoxyadenosine-3`-phosphate
  modified_base 16: mod_base = OTHER; note = 2'-fluorouridine-3'-phosphate
  modified_base 21: mod_base = OTHER; note = 2'-O-methylguanosine-3'- phosphorothioate
  modified_base 22: mod_base = OTHER; note = 2'-O-methyluridine-3'- phosphorothioate
  source 1..23: mol_type = other RNA
ataaaaatggaatactcttggtt

SEQ ID NO: 1148 - RNA, 23 nt, synthetic construct
  misc_feature 1..23: note = Synthetic
  source 1..23: mol_type = other RNA
aaccaagagtattccatttttac

SEQ ID NO: 1149 - RNA, 21 nt, synthetic construct
  misc_feature 1..21: note = Synthetic
  modified_base 1: mod_base = OTHER; note = 2'-O-methylcytidine-3'-phosphorothioate
  modified_base 2: mod_base = OTHER; note = 2'-O-methylcytidine-3'-phosphorothioate
  modified_base 7: mod_base = OTHER; note = 2'-fluoroguanosine-3'-phosphate
  modified_base 9: mod_base = OTHER; note = 2'-fluoroadenosine-3'-phosphate
  modified_base 10: mod_base = OTHER; note = 2'-fluorouridine-3'-phosphate
  modified_base 11: mod_base = OTHER; note = 2'-fluorouridine-3'-phosphate
  modified_base 21: mod_base = OTHER; note = L96
  source 1..21: mol_type = other RNA
ccaagagtattccatttttat

SEQ ID NO: 1150 - RNA, 23 nt, synthetic construct
  misc_feature 1..23: note = Synthetic
  modified_base 1: mod_base = OTHER; note = 2'-O-methyladenosine-3'-phosphorothioate
  modified_base 2: mod_base = OTHER; note = 2'-fluorouridine -3'-phosphorothioate
  modified_base 6: mod_base = OTHER; note = 2'-fluoroadenosine-3'-phosphate
  modified_base 14: mod_base = OTHER; note = 2'-fluoroadenosine-3'-phosphate
  modified_base 16: mod_base = OTHER; note = 2'-fluorouridine-3'-phosphate
  modified_base 21: mod_base = OTHER; note = 2'-O-methylguanosine-3'- phosphorothioate
  modified_base 22: mod_base = OTHER; note = 2'-O-methylcytidine-3'- phosphorothioate
  source 1..23: mol_type = other RNA
ataaaaatggaatactcttggcc

SEQ ID NO: 1151 - RNA, 21 nt, synthetic construct
  misc_feature 1..21: note = Synthetic
  source 1..21: mol_type = other RNA
ccaagagtattccatttttac

SEQ ID NO: 1152 - RNA, 19 nt, synthetic construct
  misc_feature 1..19: note = Synthetic
  modified_base 1: mod_base = OTHER; note = 2'-O-methyladenosine-3'- phosphorothioate
  modified_base 2: mod_base = OTHER; note = 2'-O-methyladenosine-3'-phosphorothioate
  modified_base 5: mod_base = OTHER; note = 2'-fluoroguanosine-3'-phosphate
  modified_base 7: mod_base = OTHER; note = 2'-fluoroadenosine-3'-phosphate
  modified_base 8: mod_base = OTHER; note = 2'-fluorouridine-3'-phosphate
  modified_base 9: mod_base = OTHER; note = 2'-fluorouridine-3'-phosphate
  modified_base 19: mod_base = OTHER; note = L96
  source 1..19: mol_type = other RNA
aagagtattccatttttat

SEQ ID NO: 1153 - RNA, 21 nt, synthetic construct
  misc_feature 1..21: note = Synthetic
  modified_base 1: mod_base = OTHER; note = 2'-O-methyladenosine-3'-phosphorothioate
  modified_base 2: mod_base = OTHER; note = 2'-fluorouridine -3'-phosphorothioate
  modified_base 6: mod_base = OTHER; note = 2'-fluoroadenosine-3'-phosphate
  modified_base 14: mod_base = OTHER; note = 2'-fluoroadenosine-3'-phosphate
  modified_base 16: mod_base = OTHER; note = 2'-fluorouridine-3'-phosphate
  modified_base 19: mod_base = OTHER; note = 2'-O-methyluridine-3'- phosphorothioate
  modified_base 20: mod_base = OTHER; note = 2'-O-methylguanosine-3'- phosphorothioate
  source 1..21: mol_type = other RNA
ataaaaatggaatactcttgg

SEQ ID NO: 1154 - RNA, 23 nt, synthetic construct
  misc_feature 1..23: note = Synthetic
  source 1..23: mol_type = other RNA
aaccaagagtattccatttttac

SEQ ID NO: 1155 - RNA, 21 nt, synthetic construct
  misc_feature 1..21: note = Synthetic
  modified_base 1: mod_base = OTHER; note = 2'-O-methylcytidine-3'-phosphorothioate
  modified_base 2: mod_base = OTHER; note = 2'-O-methylcytidine-3'-phosphorothioate
  modified_base 9: mod_base = OTHER; note = 2'-fluoroadenosine-3'-phosphate
  modified_base 10: mod_base = OTHER; note = 2'-fluorouridine-3'-phosphate
  modified_base 11: mod_base = OTHER; note = 2'-fluorouridine-3'-phosphate
  modified_base 21: mod_base = OTHER; note = L96
  source 1..21: mol_type = other RNA
ccaagagtattccatttttat

SEQ ID NO: 1156 - RNA, 23 nt, synthetic construct
  misc_feature 1..23: note = Synthetic
  modified_base 1: mod_base = OTHER; note = 2'-O-methyladenosine-3'-phosphorothioate
  modified_base 2: mod_base = OTHER; note = 2'-fluorouridine -3'-phosphorothioate
  modified_base 5: mod_base = OTHER; note = 2`-deoxyadenosine-3`-phosphate
  modified_base 7: mod_base = OTHER; note = 2`-deoxyadenosine-3`-phosphate
  modified_base 14: mod_base = OTHER; note = 2'-fluoroadenosine-3'-phosphate
  modified_base 16: mod_base = OTHER; note = 2'-fluorouridine-3'-phosphate
  modified_base 21: mod_base = OTHER; note = 2'-O-methylguanosine-3'- phosphorothioate
  modified_base 22: mod_base = OTHER; note = 2'-O-methylcytidine-3'- phosphorothioate
  source 1..23: mol_type = other RNA
ataaaaatggaatactcttggcc

SEQ ID NO: 1157 - RNA, 21 nt, synthetic construct
  misc_feature 1..21: note = Synthetic
  source 1..21: mol_type = other RNA
ccaagagtattccatttttac

SEQ ID NO: 1158 - RNA, 19 nt, synthetic construct
  misc_feature 1..19: note = Synthetic
  modified_base 1: mod_base = OTHER; note = 2'-O-methyladenosine-3'- phosphorothioate
  modified_base 2: mod_base = OTHER; note = 2'-O-methyladenosine-3'-phosphorothioate
  modified_base 7: mod_base = OTHER; note = 2'-fluoroadenosine-3'-phosphate
  modified_base 8: mod_base = OTHER; note = 2'-fluorouridine-3'-phosphate
  modified_base 9: mod_base = OTHER; note = 2'-fluorouridine-3'-phosphate
  modified_base 19: mod_base = OTHER; note = L96
  source 1..19: mol_type = other RNA
aagagtattccatttttat

SEQ ID NO: 1159 - RNA, 21 nt, synthetic construct
  misc_feature 1..21: note = Synthetic
  modified_base 1: mod_base = OTHER; note = 2'-O-methyladenosine-3'-phosphorothioate
  modified_base 2: mod_base = OTHER; note = 2'-fluorouridine -3'-phosphorothioate
  modified_base 5: mod_base = OTHER; note = 2`-deoxyadenosine-3`-phosphate
  modified_base 7: mod_base = OTHER; note = 2`-deoxyadenosine-3`-phosphate
  modified_base 14: mod_base = OTHER; note = 2'-fluoroadenosine-3'-phosphate
  modified_base 16: mod_base = OTHER; note = 2'-fluorouridine-3'-phosphate
  modified_base 19: mod_base = OTHER; note = 2'-O-methyluridine-3'- phosphorothioate
  modified_base 20: mod_base = OTHER; note = 2'-O-methylguanosine-3'- phosphorothioate
  source 1..21: mol_type = other RNA
ataaaaatggaatactcttgg

SEQ ID NO: 1160 - RNA, 23 nt, synthetic construct
  misc_feature 1..23: note = Synthetic
  source 1..23: mol_type = other RNA
aaccaagagtattccatttttac

SEQ ID NO: 1161 - RNA, 21 nt, synthetic construct
  misc_feature 1..21: note = Synthetic
  modified_base 1: mod_base = OTHER; note = 2'-O-methylcytidine-3'-phosphorothioate
  modified_base 2: mod_base = OTHER; note = 2'-O-methylcytidine-3'-phosphorothioate
  modified_base 7: mod_base = OTHER; note = 2`-deoxyguanosine-3`-phosphate
  modified_base 9: mod_base = OTHER; note = 2'-fluoroadenosine-3'-phosphate
  modified_base 10: mod_base = OTHER; note = 2'-fluorouridine-3'-phosphate
  modified_base 11: mod_base = OTHER; note = 2'-fluorouridine-3'-phosphate
  modified_base 21: mod_base = OTHER; note = L96
  source 1..21: mol_type = other RNA
ccaagagtattccatttttat

SEQ ID NO: 1162 - RNA, 23 nt, synthetic construct
  misc_feature 1..23: note = Synthetic
  modified_base 1: mod_base = OTHER; note = 2'-O-methyladenosine-3'-phosphorothioate
  modified_base 2: mod_base = OTHER; note = 2'-fluorouridine -3'-phosphorothioate
  modified_base 5: mod_base = OTHER; note = 2`-deoxyadenosine-3`-phosphate
  modified_base 7: mod_base = OTHER; note = 2`-deoxyadenosine-3`-phosphate
  modified_base 14: mod_base = OTHER; note = 2'-fluoroadenosine-3'-phosphate
  modified_base 16: mod_base = OTHER; note = 2'-fluorouridine-3'-phosphate
  modified_base 21: mod_base = OTHER; note = 2'-O-methylguanosine-3'- phosphorothioate
  modified_base 22: mod_base = OTHER; note = 2'-O-methylcytidine-3'- phosphorothioate
  source 1..23: mol_type = other RNA
ataaaaatggaatactcttggcc

SEQ ID NO: 1163 - RNA, 21 nt, synthetic construct
  misc_feature 1..21: note = Synthetic
  source 1..21: mol_type = other RNA
ccaagagtattccatttttac

SEQ ID NO: 1164 - RNA, 19 nt, synthetic construct
  misc_feature 1..19: note = Synthetic
  modified_base 1: mod_base = OTHER; note = 2'-O-methyladenosine-3'- phosphorothioate
  modified_base 2: mod_base = OTHER; note = 2'-O-methyladenosine-3'-phosphorothioate
  modified_base 5: mod_base = OTHER; note = 2`-deoxyguanosine-3`-phosphate
  modified_base 7: mod_base = OTHER; note = 2'-fluoroadenosine-3'-phosphate
  modified_base 8: mod_base = OTHER; note = 2'-fluorouridine-3'-phosphate
  modified_base 9: mod_base = OTHER; note = 2'-fluorouridine-3'-phosphate
  modified_base 19: mod_base = OTHER; note = L96
  source 1..19: mol_type = other RNA
aagagtattccatttttat

SEQ ID NO: 1165 - RNA, 21 nt, synthetic construct
  misc_feature 1..21: note = Synthetic
  modified_base 1: mod_base = OTHER; note = 2'-O-methyladenosine-3'-phosphorothioate
  modified_base 2: mod_base = OTHER; note = 2'-fluorouridine -3'-phosphorothioate
  modified_base 5: mod_base = OTHER; note = 2`-deoxyadenosine-3`-phosphate
  modified_base 7: mod_base = OTHER; note = 2`-deoxyadenosine-3`-phosphate
  modified_base 14: mod_base = OTHER; note = 2'-fluoroadenosine-3'-phosphate
  modified_base 16: mod_base = OTHER; note = 2'-fluorouridine-3'-phosphate
  modified_base 19: mod_base = OTHER; note = 2'-O-methyluridine-3'- phosphorothioate
  modified_base 20: mod_base = OTHER; note = 2'-O-methylguanosine-3'- phosphorothioate
  source 1..21: mol_type = other RNA
ataaaaatggaatactcttgg

SEQ ID NO: 1166 - RNA, 23 nt, synthetic construct
  misc_feature 1..23: note = Synthetic
  source 1..23: mol_type = other RNA
aaccaagagtattccatttttac

SEQ ID NO: 1167 - RNA, 21 nt, synthetic construct
  misc_feature 1..21: note = Synthetic
  modified_base 1: mod_base = OTHER; note = 2'-O-methylcytidine-3'-phosphorothioate
  modified_base 2: mod_base = OTHER; note = 2'-O-methylcytidine-3'-phosphorothioate
  modified_base 9: mod_base = OTHER; note = 2`-deoxyadenosine-3`-phosphate
  modified_base 10: mod_base = OTHER; note = 2'-fluorouridine-3'-phosphate
  modified_base 11: mod_base = OTHER; note = 2'-fluorouridine-3'-phosphate
  modified_base 21: mod_base = OTHER; note = L96
  source 1..21: mol_type = other RNA
ccaagagtattccatttttat

SEQ ID NO: 1168 - RNA, 23 nt, synthetic construct
  misc_feature 1..23: note = Synthetic
  modified_base 1: mod_base = OTHER; note = 2'-O-methyladenosine-3'-phosphorothioate
  modified_base 2: mod_base = OTHER; note = 2'-fluorouridine -3'-phosphorothioate
  modified_base 5: mod_base = OTHER; note = 2`-deoxyadenosine-3`-phosphate
  modified_base 7: mod_base = OTHER; note = 2`-deoxyadenosine-3`-phosphate
  modified_base 14: mod_base = OTHER; note = 2'-fluoroadenosine-3'-phosphate
  modified_base 16: mod_base = OTHER; note = 2'-fluorouridine-3'-phosphate
  modified_base 21: mod_base = OTHER; note = 2'-O-methylguanosine-3'- phosphorothioate
  modified_base 22: mod_base = OTHER; note = 2'-O-methylcytidine-3'- phosphorothioate
  source 1..23: mol_type = other RNA
ataaaaatggaatactcttggcc

SEQ ID NO: 1169 - RNA, 21 nt, synthetic construct
  misc_feature 1..21: note = Synthetic
  source 1..21: mol_type = other RNA
ccaagagtattccatttttac

SEQ ID NO: 1170 - RNA, 19 nt, synthetic construct
  misc_feature 1..19: note = Synthetic
  modified_base 1: mod_base = OTHER; note = 2'-O-methyladenosine-3'- phosphorothioate
  modified_base 2: mod_base = OTHER; note = 2'-O-methyladenosine-3'-phosphorothioate
  modified_base 7: mod_base = OTHER; note = 2`-deoxyadenosine-3`-phosphate
  modified_base 8: mod_base = OTHER; note = 2'-fluorouridine-3'-phosphate
  modified_base 9: mod_base = OTHER; note = 2'-fluorouridine-3'-phosphate
  modified_base 19: mod_base = OTHER; note = L96
  source 1..19: mol_type = other RNA
aagagtattccatttttat

SEQ ID NO: 1171 - RNA, 21 nt, synthetic construct
  misc_feature 1..21: note = Synthetic
  modified_base 1: mod_base = OTHER; note = 2'-O-methyladenosine-3'-phosphorothioate
  modified_base 2: mod_base = OTHER; note = 2'-fluorouridine -3'-phosphorothioate
  modified_base 5: mod_base = OTHER; note = 2`-deoxyadenosine-3`-phosphate
  modified_base 7: mod_base = OTHER; note = 2`-deoxyadenosine-3`-phosphate
  modified_base 14: mod_base = OTHER; note = 2'-fluoroadenosine-3'-phosphate
  modified_base 16: mod_base = OTHER; note = 2'-fluorouridine-3'-phosphate
  modified_base 19: mod_base = OTHER; note = 2'-O-methyluridine-3'- phosphorothioate
  modified_base 20: mod_base = OTHER; note = 2'-O-methylguanosine-3'- phosphorothioate
  source 1..21: mol_type = other RNA
ataaaaatggaatactcttgg

SEQ ID NO: 1172 - RNA, 23 nt, synthetic construct
  misc_feature 1..23: note = Synthetic
  source 1..23: mol_type = other RNA
aaccaagagtattccatttttac

SEQ ID NO: 1173 - RNA, 21 nt, synthetic construct
  misc_feature 1..21: note = Synthetic
  modified_base 1: mod_base = OTHER; note = 2'-O-methylcytidine-3'-phosphorothioate
  modified_base 2: mod_base = OTHER; note = 2'-O-methylcytidine-3'-phosphorothioate
  modified_base 7: mod_base = OTHER; note = 2`-deoxyguanosine-3`-phosphate
  modified_base 9: mod_base = OTHER; note = 2`-deoxyadenosine-3`-phosphate
  modified_base 10: mod_base = OTHER; note = 2'-fluorouridine-3'-phosphate
  modified_base 11: mod_base = OTHER; note = 2'-fluorouridine-3'-phosphate
  modified_base 21: mod_base = OTHER; note = L96
  source 1..21: mol_type = other RNA
ccaagagtattccatttttat

SEQ ID NO: 1174 - RNA, 23 nt, synthetic construct
  misc_feature 1..23: note = Synthetic
  modified_base 1: mod_base = OTHER; note = 2'-O-methyladenosine-3'-phosphorothioate
  modified_base 2: mod_base = OTHER; note = 2'-fluorouridine -3'-phosphorothioate
  modified_base 5: mod_base = OTHER; note = 2`-deoxyadenosine-3`-phosphate
  modified_base 7: mod_base = OTHER; note = 2`-deoxyadenosine-3`-phosphate
  modified_base 14: mod_base = OTHER; note = 2'-fluoroadenosine-3'-phosphate
  modified_base 16: mod_base = OTHER; note = 2'-fluorouridine-3'-phosphate
  modified_base 21: mod_base = OTHER; note = 2'-O-methylguanosine-3'- phosphorothioate
  modified_base 22: mod_base = OTHER; note = 2'-O-methylcytidine-3'- phosphorothioate
  source 1..23: mol_type = other RNA
ataaaaatggaatactcttggcc

SEQ ID NO: 1175 - RNA, 21 nt, synthetic construct
  misc_feature 1..21: note = Synthetic
  source 1..21: mol_type = other RNA
ccaagagtattccatttttac

SEQ ID NO: 1176 - RNA, 19 nt, synthetic construct
  misc_feature 1..19: note = Synthetic
  modified_base 1: mod_base = OTHER; note = 2'-O-methyladenosine-3'- phosphorothioate
  modified_base 2: mod_base = OTHER; note = 2'-O-methyladenosine-3'-phosphorothioate
  modified_base 5: mod_base = OTHER; note = 2`-deoxyguanosine-3`-phosphate
  modified_base 7: mod_base = OTHER; note = 2`-deoxyadenosine-3`-phosphate
  modified_base 8: mod_base = OTHER; note = 2'-fluorouridine-3'-phosphate
  modified_base 9: mod_base = OTHER; note = 2'-fluorouridine-3'-phosphate
  modified_base 19: mod_base = OTHER; note = L96
  source 1..19: mol_type = other RNA
aagagtattccatttttat

SEQ ID NO: 1177 - RNA, 21 nt, synthetic construct
  misc_feature 1..21: note = Synthetic
  modified_base 1: mod_base = OTHER; note = 2'-O-methyladenosine-3'-phosphorothioate
  modified_base 2: mod_base = OTHER; note = 2'-fluorouridine -3'-phosphorothioate
  modified_base 5: mod_base = OTHER; note = 2`-deoxyadenosine-3`-phosphate
  modified_base 7: mod_base = OTHER; note = 2`-deoxyadenosine-3`-phosphate
  modified_base 14: mod_base = OTHER; note = 2'-fluoroadenosine-3'-phosphate
  modified_base 16: mod_base = OTHER; note = 2'-fluorouridine-3'-phosphate
  modified_base 19: mod_base = OTHER; note = 2'-O-methyluridine-3'- phosphorothioate
  modified_base 20: mod_base = OTHER; note = 2'-O-methylguanosine-3'- phosphorothioate
  source 1..21: mol_type = other RNA
ataaaaatggaatactcttgg

SEQ ID NO: 1178 - RNA, 23 nt, synthetic construct
  misc_feature 1..23: note = Synthetic
  source 1..23: mol_type = other RNA
aaccaagagtattccatttttac

SEQ ID NO: 1179 - RNA, 21 nt, synthetic construct
  misc_feature 1..21: note = Synthetic
  modified_base 1: mod_base = OTHER; note = 2'-O-methylcytidine-3'-phosphorothioate
  modified_base 2: mod_base = OTHER; note = 2'-O-methylcytidine-3'-phosphorothioate
  modified_base 9: mod_base = OTHER; note = 2`-deoxyadenosine-3`-phosphate
  modified_base 10: mod_base = OTHER; note = 2'-fluorouridine-3'-phosphate
  modified_base 11: mod_base = OTHER; note = 2'-fluorouridine-3'-phosphate
  modified_base 21: mod_base = OTHER; note = L96
  source 1..21: mol_type = other RNA
ccaagagtattccatttttat

SEQ ID NO: 1180 - RNA, 23 nt, synthetic construct
  misc_feature 1..23: note = Synthetic
  modified_base 1: mod_base = OTHER; note = 2'-O-methyladenosine-3'-phosphorothioate
  modified_base 2: mod_base = OTHER; note = 2'-fluorouridine -3'-phosphorothioate
  modified_base 5: mod_base = OTHER; note = 2`-deoxyadenosine-3`-phosphate
  modified_base 7: mod_base = OTHER; note = 2`-deoxyadenosine-3`-phosphate
  modified_base 14: mod_base = OTHER; note = 2`-deoxyadenosine-3`-phosphate
  modified_base 16: mod_base = OTHER; note = 2'-fluorouridine-3'-phosphate
  modified_base 21: mod_base = OTHER; note = 2'-O-methylguanosine-3'- phosphorothioate
  modified_base 22: mod_base = OTHER; note = 2'-O-methylcytidine-3'- phosphorothioate
  source 1..23: mol_type = other RNA
ataaaaatggaatactcttggcc

SEQ ID NO: 1181 - RNA, 21 nt, synthetic construct
  misc_feature 1..21: note = Synthetic
  source 1..21: mol_type = other RNA
ccaagagtattccatttttac

SEQ ID NO: 1182 - RNA, 19 nt, synthetic construct
  misc_feature 1..19: note = Synthetic
  modified_base 1: mod_base = OTHER; note = 2'-O-methyladenosine-3'- phosphorothioate
  modified_base 2: mod_base = OTHER; note = 2'-O-methyladenosine-3'-phosphorothioate
  modified_base 7: mod_base = OTHER; note = 2`-deoxyadenosine-3`-phosphate
  modified_base 8: mod_base = OTHER; note = 2'-fluorouridine-3'-phosphate
  modified_base 9: mod_base = OTHER; note = 2'-fluorouridine-3'-phosphate
  modified_base 19: mod_base = OTHER; note = L96
  source 1..19: mol_type = other RNA
aagagtattccatttttat

SEQ ID NO: 1183 - RNA, 21 nt, synthetic construct
  misc_feature 1..21: note = Synthetic
  modified_base 1: mod_base = OTHER; note = 2'-O-methyladenosine-3'-phosphorothioate
  modified_base 2: mod_base = OTHER; note = 2'-fluorouridine -3'-phosphorothioate
  modified_base 5: mod_base = OTHER; note = 2`-deoxyadenosine-3`-phosphate
  modified_base 7: mod_base = OTHER; note = 2`-deoxyadenosine-3`-phosphate
  modified_base 14: mod_base = OTHER; note = 2`-deoxyadenosine-3`-phosphate
  modified_base 16: mod_base = OTHER; note = 2'-fluorouridine-3'-phosphate
  modified_base 21: mod_base = OTHER; note = 2'-O-methylguanosine-3'- phosphorothioate
  source 1..21: mol_type = other RNA
ataaaaatggaatactcttgg

SEQ ID NO: 1184 - RNA, 23 nt, synthetic construct
  misc_feature 1..23: note = Synthetic
  source 1..23: mol_type = other RNA
aaccaagagtattccatttttac

SEQ ID NO: 1185 - RNA, 21 nt, synthetic construct
  misc_feature 1..21: note = Synthetic
  modified_base 1: mod_base = OTHER; note = 2'-O-methylcytidine-3'-phosphorothioate
  modified_base 2: mod_base = OTHER; note = 2'-O-methylcytidine-3'-phosphorothioate
  modified_base 7: mod_base = OTHER; note = 2`-deoxyguanosine-3`-phosphate
  modified_base 9: mod_base = OTHER; note = 2`-deoxyadenosine-3`-phosphate
  modified_base 10: mod_base = OTHER; note = 2'-fluorouridine-3'-phosphate
  modified_base 11: mod_base = OTHER; note = 2'-fluorouridine-3'-phosphate
  modified_base 21: mod_base = OTHER; note = L96
  source 1..21: mol_type = other RNA
ccaagagtattccatttttat

SEQ ID NO: 1186 - RNA, 23 nt, synthetic construct
  misc_feature 1..23: note = Synthetic
  modified_base 1: mod_base = OTHER; note = 2'-O-methyladenosine-3'-phosphorothioate
  modified_base 2: mod_base = OTHER; note = 2'-fluorouridine -3'-phosphorothioate
  modified_base 5: mod_base = OTHER; note = 2`-deoxyadenosine-3`-phosphate
  modified_base 7: mod_base = OTHER; note = 2`-deoxyadenosine-3`-phosphate
  modified_base 14: mod_base = OTHER; note = 2`-deoxyadenosine-3`-phosphate
  modified_base 16: mod_base = OTHER; note = 2'-fluorouridine-3'-phosphate
  modified_base 21: mod_base = OTHER; note = 2'-O-methylguanosine-3'- phosphorothioate
  modified_base 22: mod_base = OTHER; note = 2'-O-methylcytidine-3'- phosphorothioate
  source 1..23: mol_type = other RNA
ataaaaatggaatactcttggcc

SEQ ID NO: 1187 - RNA, 21 nt, synthetic construct
  misc_feature 1..21: note = Synthetic
  source 1..21: mol_type = other RNA
ccaagagtattccatttttac

SEQ ID NO: 1188 - RNA, 19 nt, synthetic construct
  misc_feature 1..19: note = Synthetic
  modified_base 1: mod_base = OTHER; note = 2'-O-methyladenosine-3'- phosphorothioate
  modified_base 2: mod_base = OTHER; note = 2'-O-methyladenosine-3'-phosphorothioate
  modified_base 5: mod_base = OTHER; note = 2`-deoxyguanosine-3`-phosphate
  modified_base 7: mod_base = OTHER; note = 2`-deoxyadenosine-3`-phosphate
  modified_base 8: mod_base = OTHER; note = 2'-fluorouridine-3'-phosphate
  modified_base 9: mod_base = OTHER; note = 2'-fluorouridine-3'-phosphate
  modified_base 19: mod_base = OTHER; note = L96
  source 1..19: mol_type = other RNA
aagagtattccatttttat

SEQ ID NO: 1189 - RNA, 21 nt, synthetic construct
  misc_feature 1..21: note = Synthetic
  modified_base 1: mod_base = OTHER; note = 2'-O-methyladenosine-3'-phosphorothioate
  modified_base 2: mod_base = OTHER; note = 2'-fluorouridine -3'-phosphorothioate
  modified_base 5: mod_base = OTHER; note = 2`-deoxyadenosine-3`-phosphate
  modified_base 7: mod_base = OTHER; note = 2`-deoxyadenosine-3`-phosphate
  modified_base 14: mod_base = OTHER; note = 2`-deoxyadenosine-3`-phosphate
  modified_base 16: mod_base = OTHER; note = 2'-fluorouridine-3'-phosphate
  modified_base 19: mod_base = OTHER; note = 2'-O-methyluridine-3'- phosphorothioate
  modified_base 20: mod_base = OTHER; note = 2'-O-methylguanosine-3'- phosphorothioate
  source 1..21: mol_type = other RNA
ataaaaatggaatactcttgg

SEQ ID NO: 1190 - RNA, 23 nt, synthetic construct
  misc_feature 1..23: note = Synthetic
  source 1..23: mol_type = other RNA
aaccaagagtattccatttttac

SEQ ID NO: 1191 - RNA, 21 nt, synthetic construct
  misc_feature 1..21: note = Synthetic
  modified_base 1: mod_base = OTHER; note = 2'-O-methylcytidine-3'- phosphorothioate
  modified_base 2: mod_base = OTHER; note = 2'-O-methyladenosine-3'-phosphorothioate
  modified_base 7: mod_base = OTHER; note = 2'-fluorouridine-3'-phosphate
  modified_base 9: mod_base = OTHER; note = 2'-fluorouridine-3'-phosphate
  modified_base 10: mod_base = OTHER; note = 2'-fluorouridine-3'-phosphate
  modified_base 11: mod_base = OTHER; note = 2'-fluorocytidine-3'-phosphate
  modified_base 21: mod_base = OTHER; note = L96
  source 1..21: mol_type = other RNA
caagagtattccatttttact

SEQ ID NO: 1192 - RNA, 23 nt, synthetic construct
  misc_feature 1..23: note = Synthetic
  modified_base 1: mod_base = OTHER; note = 2'-O-methyladenosine-3'- phosphorothioate
  modified_base 2: mod_base = OTHER; note = 2'-fluoroguanosine-3'-phosphorothioate
  modified_base 6: mod_base = OTHER; note = 2'-fluoroadenosine-3'-phosphate
  modified_base 14: mod_base = OTHER; note = 2'-fluorouridine-3'-phosphate
  modified_base 16: mod_base = OTHER; note = 2'-fluorocytidine-3'-phosphate
  modified_base 21: mod_base = OTHER; note = 2'-O-methylguanosine-3'-phosphorothioate
  modified_base 22: mod_base = OTHER; note = 2'-O-methylguanosine-3'- phosphorothioate
  source 1..23: mol_type = other RNA
agtaaaaatggaatactcttggt

SEQ ID NO: 1193 - RNA, 23 nt, synthetic construct
  misc_feature 1..23: note = Synthetic
  source 1..23: mol_type = other RNA
accaagagtattccatttttact

SEQ ID NO: 1194 - RNA, 21 nt, synthetic construct
  misc_feature 1..21: note = Synthetic
  modified_base 1: mod_base = OTHER; note = 2'-O-methylcytidine-3'- phosphorothioate
  modified_base 2: mod_base = OTHER; note = 2'-O-methyladenosine-3'-phosphorothioate
  modified_base 7: mod_base = OTHER; note = 2'-fluorouridine-3'-phosphate
  modified_base 9: mod_base = OTHER; note = 2'-fluorouridine-3'-phosphate
  modified_base 10: mod_base = OTHER; note = 2'-fluorouridine-3'-phosphate
  modified_base 11: mod_base = OTHER; note = 2'-fluorocytidine-3'-phosphate
  modified_base 21: mod_base = OTHER; note = L96
  source 1..21: mol_type = other RNA
caagagtattccatttttact

SEQ ID NO: 1195 - RNA, 23 nt, synthetic construct
  misc_feature 1..23: note = Synthetic
  modified_base 1: mod_base = OTHER; note = 2'-O-methyladenosine-3'- phosphorothioate
  modified_base 2: mod_base = OTHER; note = 2`-deoxyguanosine-3`-phosphorothioate
  modified_base 6: mod_base = OTHER; note = 2'-fluoroadenosine-3'-phosphate
  modified_base 14: mod_base = OTHER; note = 2'-fluorouridine-3'-phosphate
  modified_base 16: mod_base = OTHER; note = 2'-fluorocytidine-3'-phosphate
  modified_base 21: mod_base = OTHER; note = 2'-O-methylguanosine-3'-phosphorothioate
  modified_base 22: mod_base = OTHER; note = 2'-O-methylguanosine-3'- phosphorothioate
  source 1..23: mol_type = other RNA
agtaaaaatggaatactcttggt

SEQ ID NO: 1196 - RNA, 23 nt, synthetic construct
  misc_feature 1..23: note = Synthetic
  source 1..23: mol_type = other RNA
accaagagtattccatttttact

SEQ ID NO: 1197 - RNA, 21 nt, synthetic construct
  misc_feature 1..21: note = Synthetic
  modified_base 1: mod_base = OTHER; note = 2'-O-methylcytidine-3'- phosphorothioate
  modified_base 2: mod_base = OTHER; note = 2'-O-methyladenosine-3'-phosphorothioate
  modified_base 7: mod_base = OTHER; note = 2'-fluorouridine-3'-phosphate
  modified_base 9: mod_base = OTHER; note = 2'-fluorouridine-3'-phosphate
  modified_base 10: mod_base = OTHER; note = 2'-fluorouridine-3'-phosphate
  modified_base 11: mod_base = OTHER; note = 2'-fluorocytidine-3'-phosphate
  modified_base 21: mod_base = OTHER; note = L96
  source 1..21: mol_type = other RNA
caagagtattccatttttact

SEQ ID NO: 1198 - RNA, 23 nt, synthetic construct
  misc_feature 1..23: note = Synthetic
  modified_base 1: mod_base = OTHER; note = 2'-O-methyladenosine-3'- phosphorothioate
  modified_base 2: mod_base = OTHER; note = 2'-fluoroguanosine-3'-phosphorothioate
  modified_base 5: mod_base = OTHER; note = 2`-deoxyadenosine-3`-phosphate
  modified_base 7: mod_base = OTHER; note = 2`-deoxyadenosine-3`-phosphate
  modified_base 14: mod_base = OTHER; note = 2'-fluorouridine-3'-phosphate
  modified_base 16: mod_base = OTHER; note = 2'-fluorocytidine-3'-phosphate
  modified_base 21: mod_base = OTHER; note = 2'-O-methylguanosine-3'-phosphorothioate
  modified_base 22: mod_base = OTHER; note = 2'-O-methylguanosine-3'- phosphorothioate
  source 1..23: mol_type = other RNA
agtaaaaatggaatactcttggt

SEQ ID NO: 1199 - RNA, 23 nt, synthetic construct
  misc_feature 1..23: note = Synthetic
  source 1..23: mol_type = other RNA
accaagagtattccatttttact

SEQ ID NO: 1200 - RNA, 21 nt, synthetic construct
  misc_feature 1..21: note = Synthetic
  modified_base 1: mod_base = OTHER; note = 2'-O-methylcytidine-3'- phosphorothioate
  modified_base 2: mod_base = OTHER; note = 2'-O-methyladenosine-3'-phosphorothioate
  modified_base 7: mod_base = OTHER; note = 2'-fluorouridine-3'-phosphate
  modified_base 9: mod_base = OTHER; note = 2'-fluorouridine-3'-phosphate
  modified_base 10: mod_base = OTHER; note = 2'-fluorouridine-3'-phosphate
  modified_base 11: mod_base = OTHER; note = 2'-fluorocytidine-3'-phosphate
  modified_base 21: mod_base = OTHER; note = L96
  source 1..21: mol_type = other RNA
caagagtattccatttttact

SEQ ID NO: 1201 - RNA, 23 nt, synthetic construct
  misc_feature 1..23: note = Synthetic
  modified_base 1: mod_base = OTHER; note = 2'-O-methyladenosine-3'- phosphorothioate
  modified_base 2: mod_base = OTHER; note = 2`-deoxyguanosine-3`-phosphorothioate
  modified_base 5: mod_base = OTHER; note = 2`-deoxyadenosine-3`-phosphate
  modified_base 7: mod_base = OTHER; note = 2`-deoxyadenosine-3`-phosphate
  modified_base 14: mod_base = OTHER; note = 2'-fluorouridine-3'-phosphate
  modified_base 16: mod_base = OTHER; note = 2'-fluorocytidine-3'-phosphate
  modified_base 21: mod_base = OTHER; note = 2'-O-methylguanosine-3'-phosphorothioate
  modified_base 22: mod_base = OTHER; note = 2'-O-methylguanosine-3'- phosphorothioate
  source 1..23: mol_type = other RNA
agtaaaaatggaatactcttggt

SEQ ID NO: 1202 - RNA, 23 nt, synthetic construct
  misc_feature 1..23: note = Synthetic
  source 1..23: mol_type = other RNA
accaagagtattccatttttact

SEQ ID NO: 1203 - RNA, 21 nt, synthetic construct
  misc_feature 1..21: note = Synthetic
  modified_base 1: mod_base = OTHER; note = 2'-O-methylcytidine-3'- phosphorothioate
  modified_base 2: mod_base = OTHER; note = 2'-O-methyladenosine-3'-phosphorothioate
  modified_base 9: mod_base = OTHER; note = 2'-fluorouridine-3'-phosphate
  modified_base 10: mod_base = OTHER; note = 2'-fluorouridine-3'-phosphate
  modified_base 11: mod_base = OTHER; note = 2'-fluorocytidine-3'-phosphate
  modified_base 21: mod_base = OTHER; note = L96
  source 1..21: mol_type = other RNA
caagagtattccatttttact

SEQ ID NO: 1204 - RNA, 23 nt, synthetic construct
  misc_feature 1..23: note = Synthetic
  modified_base 1: mod_base = OTHER; note = 2'-O-methyladenosine-3'- phosphorothioate
  modified_base 2: mod_base = OTHER; note = 2'-fluoroguanosine-3'-phosphorothioate
  modified_base 6: mod_base = OTHER; note = 2'-fluoroadenosine-3'-phosphate
  modified_base 14: mod_base = OTHER; note = 2'-fluorouridine-3'-phosphate
  modified_base 16: mod_base = OTHER; note = 2'-fluorocytidine-3'-phosphate
  modified_base 21: mod_base = OTHER; note = 2'-O-methylguanosine-3'-phosphorothioate
  modified_base 22: mod_base = OTHER; note = 2'-O-methylguanosine-3'- phosphorothioate
  source 1..23: mol_type = other RNA
agtaaaaatggaatactcttggt

SEQ ID NO: 1205 - RNA, 23 nt, synthetic construct
  misc_feature 1..23: note = Synthetic
  source 1..23: mol_type = other RNA
accaagagtattccatttttact

SEQ ID NO: 1206 - RNA, 21 nt, synthetic construct
  modified_base 7: mod_base = OTHER; note = thymine
  misc_feature 1..21: note = Synthetic
  modified_base 1: mod_base = OTHER; note = 2'-O-methylcytidine-3'- phosphorothioate
  modified_base 2: mod_base = OTHER; note = 2'-O-methyladenosine-3'-phosphorothioate
  modified_base 7: mod_base = OTHER; note = 2`-deoxythimidine -3`-phosphate
  modified_base 9: mod_base = OTHER; note = 2'-fluorouridine-3'-phosphate
  modified_base 10: mod_base = OTHER; note = 2'-fluorouridine-3'-phosphate
  modified_base 11: mod_base = OTHER; note = 2'-fluorocytidine-3'-phosphate
  modified_base 21: mod_base = OTHER; note = L96
  source 1..21: mol_type = other RNA
caagagtattccatttttact

SEQ ID NO: 1207 - RNA, 23 nt, synthetic construct
  misc_feature 1..23: note = Synthetic
  modified_base 1: mod_base = OTHER; note = 2'-O-methyladenosine-3'- phosphorothioate
  modified_base 2: mod_base = OTHER; note = 2'-fluoroguanosine-3'-phosphorothioate
  modified_base 6: mod_base = OTHER; note = 2'-fluoroadenosine-3'-phosphate
  modified_base 14: mod_base = OTHER; note = 2'-fluorouridine-3'-phosphate
  modified_base 16: mod_base = OTHER; note = 2'-fluorocytidine-3'-phosphate
  modified_base 21: mod_base = OTHER; note = 2'-O-methylguanosine-3'-phosphorothioate
  modified_base 22: mod_base = OTHER; note = 2'-O-methylguanosine-3'- phosphorothioate
  source 1..23: mol_type = other RNA
agtaaaaatggaatactcttggt

SEQ ID NO: 1208 - RNA, 23 nt, synthetic construct
  misc_feature 1..23: note = Synthetic
  source 1..23: mol_type = other RNA
accaagagtattccatttttact

SEQ ID NO: 1209 - RNA, 21 nt, synthetic construct
  misc_feature 1..21: note = Synthetic
  modified_base 1: mod_base = OTHER; note = 2'-O-methylcytidine-3'- phosphorothioate
  modified_base 2: mod_base = OTHER; note = 2'-O-methyladenosine-3'-phosphorothioate
  modified_base 7: mod_base = OTHER; note = 2'-fluorouridine-3'-phosphate
  modified_base 9: mod_base = OTHER; note = 2'-fluorouridine-3'-phosphate
  modified_base 10: mod_base = OTHER; note = 2'-fluorouridine-3'-phosphate
  modified_base 11: mod_base = OTHER; note = 2'-fluorocytidine-3'-phosphate
  modified_base 21: mod_base = OTHER; note = L96
  source 1..21: mol_type = other RNA
caagagtattccatttttact

SEQ ID NO: 1210 - RNA, 23 nt, synthetic construct
  misc_feature 1..23: note = Synthetic
  modified_base 1: mod_base = OTHER; note = 2'-O-methyladenosine-3'- phosphorothioate
  modified_base 2: mod_base = OTHER; note = 2'-fluoroguanosine-3'-phosphorothioate
  modified_base 6: mod_base = OTHER; note = 2'-fluoroadenosine-3'-phosphate
  modified_base 14: mod_base = OTHER; note = 2'-fluorouridine-3'-phosphate
  modified_base 16: mod_base = OTHER; note = 2'-fluorocytidine-3'-phosphate
  modified_base 21: mod_base = OTHER; note = 2'-O-methylguanosine-3'-phosphorothioate
  modified_base 22: mod_base = OTHER; note = 2'-O-methylcytidine-3'- phosphorothioate
  source 1..23: mol_type = other RNA
agtaaaaatggaatactcttgcc

SEQ ID NO: 1211 - RNA, 23 nt, synthetic construct
  misc_feature 1..23: note = Synthetic
  source 1..23: mol_type = other RNA
accaagagtattccatttttact

SEQ ID NO: 1212 - RNA, 19 nt, synthetic construct
  misc_feature 1..19: note = Synthetic
  modified_base 1: mod_base = OTHER; note = 2'-O-methyladenosine-3'- phosphorothioate
  modified_base 2: mod_base = OTHER; note = 2'-O-methylguanosine-3'-phosphorothioate
  modified_base 5: mod_base = OTHER; note = 2'-fluorouridine-3'-phosphate
  modified_base 7: mod_base = OTHER; note = 2'-fluorouridine-3'-phosphate
  modified_base 8: mod_base = OTHER; note = 2'-fluorouridine-3'-phosphate
  modified_base 9: mod_base = OTHER; note = 2'-fluorocytidine-3'-phosphate
  modified_base 19: mod_base = OTHER; note = L96
  source 1..19: mol_type = other RNA
agagtattccatttttact

SEQ ID NO: 1213 - RNA, 21 nt, synthetic construct
  misc_feature 1..21: note = Synthetic
  modified_base 1: mod_base = OTHER; note = 2'-O-methyladenosine-3'- phosphorothioate
  modified_base 2: mod_base = OTHER; note = 2'-fluoroguanosine-3'-phosphorothioate
  modified_base 6: mod_base = OTHER; note = 2'-fluoroadenosine-3'-phosphate
  modified_base 14: mod_base = OTHER; note = 2'-fluorouridine-3'-phosphate
  modified_base 16: mod_base = OTHER; note = 2'-fluorocytidine-3'-phosphate
  modified_base 19: mod_base = OTHER; note = 2'-O-methyluridine-3'-phosphorothioate
  modified_base 20: mod_base = OTHER; note = 2'-O-methyluridine-3'- phosphorothioate
  source 1..21: mol_type = other RNA
agtaaaaatggaatactcttg

SEQ ID NO: 1214 - RNA, 21 nt, synthetic construct
  misc_feature 1..21: note = Synthetic
  source 1..21: mol_type = other RNA
caagagtattccatttttact

SEQ ID NO: 1215 - RNA, 21 nt, synthetic construct
  misc_feature 1..21: note = Synthetic
  modified_base 1: mod_base = OTHER; note = 2'-O-methylcytidine-3'- phosphorothioate
  modified_base 2: mod_base = OTHER; note = 2'-O-methyladenosine-3'-phosphorothioate
  modified_base 9: mod_base = OTHER; note = 2'-fluorouridine-3'-phosphate
  modified_base 10: mod_base = OTHER; note = 2'-fluorouridine-3'-phosphate
  modified_base 11: mod_base = OTHER; note = 2'-fluorocytidine-3'-phosphate
  modified_base 21: mod_base = OTHER; note = L96
  source 1..21: mol_type = other RNA
caagagtattccatttttact

SEQ ID NO: 1216 - RNA, 23 nt, synthetic construct
  modified_base 14: mod_base = OTHER; note = thymine
  misc_feature 1..23: note = Synthetic
  modified_base 1: mod_base = OTHER; note = 2'-O-methyladenosine-3'- phosphorothioate
  modified_base 2: mod_base = OTHER; note = 2`-deoxyguanosine-3`-phosphorothioate
  modified_base 5: mod_base = OTHER; note = 2`-deoxyadenosine-3`-phosphate
  modified_base 7: mod_base = OTHER; note = 2`-deoxyadenosine-3`-phosphate
  modified_base 12: mod_base = OTHER; note = 2`-deoxyadenosine-3`-phosphate
  modified_base 14: mod_base = OTHER; note = 2`-deoxythimidine -3`-phosphate
  modified_base 16: mod_base = OTHER; note = 2`-deoxycytidine-3`-phosphate
  modified_base 21: mod_base = OTHER; note = 2'-O-methylguanosine-3'-phosphorothioate
  modified_base 22: mod_base = OTHER; note = 2'-O-methylguanosine-3'- phosphorothioate
  source 1..23: mol_type = other RNA
agtaaaaatggaatactcttggt

SEQ ID NO: 1217 - RNA, 23 nt, synthetic construct
  misc_feature 1..23: note = Synthetic
  source 1..23: mol_type = other RNA
accaagagtattccatttttact

SEQ ID NO: 1218 - RNA, 21 nt, synthetic construct
  misc_feature 1..21: note = Synthetic
  modified_base 1: mod_base = OTHER; note = 2'-O-methylcytidine-3'- phosphorothioate
  modified_base 2: mod_base = OTHER; note = 2'-O-methyladenosine-3'-phosphorothioate
  modified_base 9: mod_base = OTHER; note = 2'-fluorouridine-3'-phosphate
  modified_base 10: mod_base = OTHER; note = 2'-fluorouridine-3'-phosphate
  modified_base 11: mod_base = OTHER; note = 2'-fluorocytidine-3'-phosphate
  modified_base 21: mod_base = OTHER; note = L96
  source 1..21: mol_type = other RNA
caagagtattccatttttact

SEQ ID NO: 1219 - RNA, 23 nt, synthetic construct
  misc_feature 1..23: note = Synthetic
  modified_base 1: mod_base = OTHER; note = 2'-O-methyladenosine-3'- phosphorothioate
  modified_base 2: mod_base = OTHER; note = 2`-deoxyguanosine-3`-phosphorothioate
  modified_base 6: mod_base = OTHER; note = 2'-fluoroadenosine-3'-phosphate
  modified_base 14: mod_base = OTHER; note = 2'-fluorouridine-3'-phosphate
  modified_base 16: mod_base = OTHER; note = 2'-fluorocytidine-3'-phosphate
  modified_base 21: mod_base = OTHER; note = 2'-O-methylguanosine-3'-phosphorothioate
  modified_base 22: mod_base = OTHER; note = 2'-O-methylguanosine-3'- phosphorothioate
  source 1..23: mol_type = other RNA
agtaaaaatggaatactcttggt

SEQ ID NO: 1220 - RNA, 23 nt, synthetic construct
  misc_feature 1..23: note = Synthetic
  source 1..23: mol_type = other RNA
accaagagtattccatttttact

SEQ ID NO: 1221 - RNA, 21 nt, synthetic construct
  modified_base 7: mod_base = OTHER; note = thymine
  misc_feature 1..21: note = Synthetic
  modified_base 1: mod_base = OTHER; note = 2'-O-methylcytidine-3'- phosphorothioate
  modified_base 2: mod_base = OTHER; note = 2'-O-methyladenosine-3'-phosphorothioate
  modified_base 7: mod_base = OTHER; note = 2`-deoxythimidine -3`-phosphate
  modified_base 9: mod_base = OTHER; note = 2'-fluorouridine-3'-phosphate
  modified_base 10: mod_base = OTHER; note = 2'-fluorouridine-3'-phosphate
  modified_base 11: mod_base = OTHER; note = 2'-fluorocytidine-3'-phosphate
  modified_base 21: mod_base = OTHER; note = L96
  source 1..21: mol_type = other RNA
caagagtattccatttttact

SEQ ID NO: 1222 - RNA, 23 nt, synthetic construct
  misc_feature 1..23: note = Synthetic
  modified_base 1: mod_base = OTHER; note = 2'-O-methyladenosine-3'- phosphorothioate
  modified_base 2: mod_base = OTHER; note = 2`-deoxyguanosine-3`-phosphorothioate
  modified_base 6: mod_base = OTHER; note = 2'-fluoroadenosine-3'-phosphate
  modified_base 14: mod_base = OTHER; note = 2'-fluorouridine-3'-phosphate
  modified_base 16: mod_base = OTHER; note = 2'-fluorocytidine-3'-phosphate
  modified_base 21: mod_base = OTHER; note = 2'-O-methylguanosine-3'-phosphorothioate
  modified_base 22: mod_base = OTHER; note = 2'-O-methylguanosine-3'- phosphorothioate
  source 1..23: mol_type = other RNA
agtaaaaatggaatactcttggt

SEQ ID NO: 1223 - RNA, 23 nt, synthetic construct
  misc_feature 1..23: note = Synthetic
  source 1..23: mol_type = other RNA
accaagagtattccatttttact

SEQ ID NO: 1224 - RNA, 21 nt, synthetic construct
  misc_feature 1..21: note = Synthetic
  modified_base 1: mod_base = OTHER; note = 2'-O-methylcytidine-3'- phosphorothioate
  modified_base 2: mod_base = OTHER; note = 2'-O-methyladenosine-3'-phosphorothioate
  modified_base 9: mod_base = OTHER; note = 2'-fluorouridine-3'-phosphate
  modified_base 10: mod_base = OTHER; note = 2'-fluorouridine-3'-phosphate
  modified_base 11: mod_base = OTHER; note = 2'-fluorocytidine-3'-phosphate
  modified_base 21: mod_base = OTHER; note = L96
  source 1..21: mol_type = other RNA
caagagtattccatttttact

SEQ ID NO: 1225 - RNA, 23 nt, synthetic construct
  misc_feature 1..23: note = Synthetic
  modified_base 1: mod_base = OTHER; note = 2'-O-methyladenosine-3'- phosphorothioate
  modified_base 2: mod_base = OTHER; note = 2`-deoxyguanosine-3`-phosphorothioate
  modified_base 5: mod_base = OTHER; note = 2`-deoxyadenosine-3`-phosphate
  modified_base 7: mod_base = OTHER; note = 2`-deoxyadenosine-3`-phosphate
  modified_base 14: mod_base = OTHER; note = 2'-fluorouridine-3'-phosphate
  modified_base 16: mod_base = OTHER; note = 2'-fluorocytidine-3'-phosphate
  modified_base 21: mod_base = OTHER; note = 2'-O-methylguanosine-3'-phosphorothioate
  modified_base 22: mod_base = OTHER; note = 2'-O-methylguanosine-3'- phosphorothioate
  source 1..23: mol_type = other RNA
agtaaaaatggaatactcttggt

SEQ ID NO: 1226 - RNA, 23 nt, synthetic construct
  misc_feature 1..23: note = Synthetic
  source 1..23: mol_type = other RNA
accaagagtattccatttttact

SEQ ID NO: 1227 - RNA, 21 nt, synthetic construct
  modified_base 7: mod_base = OTHER; note = thymine
  misc_feature 1..21: note = Synthetic
  modified_base 1: mod_base = OTHER; note = 2'-O-methylcytidine-3'- phosphorothioate
  modified_base 2: mod_base = OTHER; note = 2'-O-methyladenosine-3'-phosphorothioate
  modified_base 7: mod_base = OTHER; note = 2`-deoxythimidine -3`-phosphate
  modified_base 9: mod_base = OTHER; note = 2'-fluorouridine-3'-phosphate
  modified_base 10: mod_base = OTHER; note = 2'-fluorouridine-3'-phosphate
  modified_base 11: mod_base = OTHER; note = 2'-fluorocytidine-3'-phosphate
  modified_base 21: mod_base = OTHER; note = L96
  source 1..21: mol_type = other RNA
caagagtattccatttttact

SEQ ID NO: 1228 - RNA, 23 nt, synthetic construct
  misc_feature 1..23: note = Synthetic
  modified_base 1: mod_base = OTHER; note = 2'-O-methyladenosine-3'- phosphorothioate
  modified_base 2: mod_base = OTHER; note = 2`-deoxyguanosine-3`-phosphorothioate
  modified_base 5: mod_base = OTHER; note = 2`-deoxyadenosine-3`-phosphate
  modified_base 7: mod_base = OTHER; note = 2`-deoxyadenosine-3`-phosphate
  modified_base 14: mod_base = OTHER; note = 2'-fluorouridine-3'-phosphate
  modified_base 16: mod_base = OTHER; note = 2'-fluorocytidine-3'-phosphate
  modified_base 21: mod_base = OTHER; note = 2'-O-methylguanosine-3'-phosphorothioate
  modified_base 22: mod_base = OTHER; note = 2'-O-methylguanosine-3'- phosphorothioate
  source 1..23: mol_type = other RNA
agtaaaaatggaatactcttggt

SEQ ID NO: 1229 - RNA, 23 nt, synthetic construct
  misc_feature 1..23: note = Synthetic
  source 1..23: mol_type = other RNA
accaagagtattccatttttact

SEQ ID NO: 1230 - RNA, 21 nt, synthetic construct
  misc_feature 1..21: note = Synthetic
  modified_base 1: mod_base = OTHER; note = 2'-O-methylcytidine-3'- phosphorothioate
  modified_base 2: mod_base = OTHER; note = 2'-O-methyladenosine-3'-phosphorothioate
  modified_base 7: mod_base = OTHER; note = 2'-fluorouridine-3'-phosphate
  modified_base 9: mod_base = OTHER; note = 2'-fluorouridine-3'-phosphate
  modified_base 10: mod_base = OTHER; note = 2'-fluorouridine-3'-phosphate
  modified_base 11: mod_base = OTHER; note = 2'-fluorocytidine-3'-phosphate
  modified_base 21: mod_base = OTHER; note = L96
  source 1..21: mol_type = other RNA
caagagtattccatttttact

SEQ ID NO: 1231 - RNA, 23 nt, synthetic construct
  misc_feature 1..23: note = Synthetic
  modified_base 1: mod_base = OTHER; note = 2'-O-methyladenosine-3'- phosphorothioate
  modified_base 2: mod_base = OTHER; note = 2`-deoxyguanosine-3`-phosphorothioate
  modified_base 5: mod_base = OTHER; note = 2`-deoxyadenosine-3`-phosphate
  modified_base 7: mod_base = OTHER; note = 2`-deoxyadenosine-3`-phosphate
  modified_base 14: mod_base = OTHER; note = 2'-fluorouridine-3'-phosphate
  modified_base 16: mod_base = OTHER; note = 2'-fluorocytidine-3'-phosphate
  modified_base 21: mod_base = OTHER; note = 2'-O-methylguanosine-3'-phosphorothioate
  modified_base 22: mod_base = OTHER; note = 2'-O-methylcytidine-3'- phosphorothioate
  source 1..23: mol_type = other RNA
agtaaaaatggaatactcttgcc

SEQ ID NO: 1232 - RNA, 23 nt, synthetic construct
  misc_feature 1..23: note = Synthetic
  source 1..23: mol_type = other RNA
accaagagtattccatttttact

SEQ ID NO: 1233 - RNA, 19 nt, synthetic construct
  misc_feature 1..19: note = Synthetic
  modified_base 1: mod_base = OTHER; note = 2'-O-methyladenosine-3'- phosphorothioate
  modified_base 2: mod_base = OTHER; note = 2'-O-methylguanosine-3'-phosphorothioate
  modified_base 5: mod_base = OTHER; note = 2'-fluorouridine-3'-phosphate
  modified_base 7: mod_base = OTHER; note = 2'-fluorouridine-3'-phosphate
  modified_base 8: mod_base = OTHER; note = 2'-fluorouridine-3'-phosphate
  modified_base 9: mod_base = OTHER; note = 2'-fluorocytidine-3'-phosphate
  modified_base 19: mod_base = OTHER; note = L96
  source 1..19: mol_type = other RNA
agagtattccatttttact

SEQ ID NO: 1234 - RNA, 21 nt, synthetic construct
  misc_feature 1..21: note = Synthetic
  modified_base 1: mod_base = OTHER; note = 2'-O-methyladenosine-3'- phosphorothioate
  modified_base 2: mod_base = OTHER; note = 2`-deoxyguanosine-3`-phosphorothioate
  modified_base 5: mod_base = OTHER; note = 2`-deoxyadenosine-3`-phosphate
  modified_base 7: mod_base = OTHER; note = 2`-deoxyadenosine-3`-phosphate
  modified_base 14: mod_base = OTHER; note = 2'-fluorouridine-3'-phosphate
  modified_base 16: mod_base = OTHER; note = 2'-fluorocytidine-3'-phosphate
  modified_base 19: mod_base = OTHER; note = 2'-O-methyluridine-3'-phosphorothioate
  modified_base 20: mod_base = OTHER; note = 2'-O-methyluridine-3'- phosphorothioate
  source 1..21: mol_type = other RNA
agtaaaaatggaatactcttg

SEQ ID NO: 1235 - RNA, 21 nt, synthetic construct
  misc_feature 1..21: note = Synthetic
  source 1..21: mol_type = other RNA
caagagtattccatttttact

SEQ ID NO: 1236 - RNA, 21 nt, synthetic construct
  misc_feature 1..21: note = Synthetic
  modified_base 1: mod_base = OTHER; note = 2'-O-methylcytidine-3'- phosphorothioate
  modified_base 2: mod_base = OTHER; note = 2'-O-methyladenosine-3'-phosphorothioate
  modified_base 9: mod_base = OTHER; note = 2'-fluorouridine-3'-phosphate
  modified_base 10: mod_base = OTHER; note = 2'-fluorouridine-3'-phosphate
  modified_base 11: mod_base = OTHER; note = 2'-fluorocytidine-3'-phosphate
  modified_base 21: mod_base = OTHER; note = L96
  source 1..21: mol_type = other RNA
caagagtattccatttttact

SEQ ID NO: 1237 - RNA, 23 nt, synthetic construct
  misc_feature 1..23: note = Synthetic
  modified_base 1: mod_base = OTHER; note = 2'-O-methyladenosine-3'- phosphorothioate
  modified_base 2: mod_base = OTHER; note = 2`-deoxyguanosine-3`-phosphorothioate
  modified_base 5: mod_base = OTHER; note = 2`-deoxyadenosine-3`-phosphate
  modified_base 7: mod_base = OTHER; note = 2`-deoxyadenosine-3`-phosphate
  modified_base 14: mod_base = OTHER; note = 2'-fluorouridine-3'-phosphate
  modified_base 16: mod_base = OTHER; note = 2'-fluorocytidine-3'-phosphate
  modified_base 21: mod_base = OTHER; note = 2'-O-methylguanosine-3'-phosphorothioate
  modified_base 22: mod_base = OTHER; note = 2'-O-methylcytidine-3'- phosphorothioate
  source 1..23: mol_type = other RNA
agtaaaaatggaatactcttgcc

SEQ ID NO: 1238 - RNA, 23 nt, synthetic construct
  misc_feature 1..23: note = Synthetic
  source 1..23: mol_type = other RNA
accaagagtattccatttttact

SEQ ID NO: 1239 - RNA, 19 nt, synthetic construct
  misc_feature 1..19: note = Synthetic
  modified_base 1: mod_base = OTHER; note = 2'-O-methyladenosine-3'- phosphorothioate
  modified_base 2: mod_base = OTHER; note = 2'-O-methylguanosine-3'-phosphorothioate
  modified_base 7: mod_base = OTHER; note = 2'-fluorouridine-3'-phosphate
  modified_base 8: mod_base = OTHER; note = 2'-fluorouridine-3'-phosphate
  modified_base 9: mod_base = OTHER; note = 2'-fluorocytidine-3'-phosphate
  modified_base 19: mod_base = OTHER; note = L96
  source 1..19: mol_type = other RNA
agagtattccatttttact

SEQ ID NO: 1240 - RNA, 21 nt, synthetic construct
  misc_feature 1..21: note = Synthetic
  modified_base 1: mod_base = OTHER; note = 2'-O-methyladenosine-3'- phosphorothioate
  modified_base 2: mod_base = OTHER; note = 2`-deoxyguanosine-3`-phosphorothioate
  modified_base 5: mod_base = OTHER; note = 2`-deoxyadenosine-3`-phosphate
  modified_base 7: mod_base = OTHER; note = 2`-deoxyadenosine-3`-phosphate
  modified_base 14: mod_base = OTHER; note = 2'-fluorouridine-3'-phosphate
  modified_base 16: mod_base = OTHER; note = 2'-fluorocytidine-3'-phosphate
  modified_base 19: mod_base = OTHER; note = 2'-O-methyluridine-3'-phosphorothioate
  modified_base 20: mod_base = OTHER; note = 2'-O-methyluridine-3'- phosphorothioate
  source 1..21: mol_type = other RNA
agtaaaaatggaatactcttg

SEQ ID NO: 1241 - RNA, 21 nt, synthetic construct
  misc_feature 1..21: note = Synthetic
  source 1..21: mol_type = other RNA
caagagtattccatttttact

SEQ ID NO: 1242 - RNA, 21 nt, synthetic construct
  modified_base 7: mod_base = OTHER; note = thymine
  misc_feature 1..21: note = Synthetic
  modified_base 1: mod_base = OTHER; note = 2'-O-methylcytidine-3'- phosphorothioate
  modified_base 2: mod_base = OTHER; note = 2'-O-methyladenosine-3'-phosphorothioate
  modified_base 7: mod_base = OTHER; note = 2`-deoxythimidine -3`-phosphate
  modified_base 9: mod_base = OTHER; note = 2'-fluorouridine-3'-phosphate
  modified_base 10: mod_base = OTHER; note = 2'-fluorouridine-3'-phosphate
  modified_base 11: mod_base = OTHER; note = 2'-fluorocytidine-3'-phosphate
  modified_base 21: mod_base = OTHER; note = L96
  source 1..21: mol_type = other RNA
caagagtattccatttttact

SEQ ID NO: 1243 - RNA, 23 nt, synthetic construct
  misc_feature 1..23: note = Synthetic
  modified_base 1: mod_base = OTHER; note = 2'-O-methyladenosine-3'- phosphorothioate
  modified_base 2: mod_base = OTHER; note = 2`-deoxyguanosine-3`-phosphorothioate
  modified_base 5: mod_base = OTHER; note = 2`-deoxyadenosine-3`-phosphate
  modified_base 7: mod_base = OTHER; note = 2`-deoxyadenosine-3`-phosphate
  modified_base 14: mod_base = OTHER; note = 2'-fluorouridine-3'-phosphate
  modified_base 16: mod_base = OTHER; note = 2'-fluorocytidine-3'-phosphate
  modified_base 21: mod_base = OTHER; note = 2'-O-methylguanosine-3'-phosphorothioate
  modified_base 22: mod_base = OTHER; note = 2'-O-methylcytidine-3'- phosphorothioate
  source 1..23: mol_type = other RNA
agtaaaaatggaatactcttgcc

SEQ ID NO: 1244 - RNA, 23 nt, synthetic construct
  misc_feature 1..23: note = Synthetic
  source 1..23: mol_type = other RNA
accaagagtattccatttttact

SEQ ID NO: 1245 - RNA, 19 nt, synthetic construct
  modified_base 5: mod_base = OTHER; note = thymine
  misc_feature 1..19: note = Synthetic
  modified_base 1: mod_base = OTHER; note = 2'-O-methyladenosine-3'- phosphorothioate
  modified_base 2: mod_base = OTHER; note = 2'-O-methylguanosine-3'-phosphorothioate
  modified_base 5: mod_base = OTHER; note = 2`-deoxythimidine -3`-phosphate
  modified_base 7: mod_base = OTHER; note = 2'-fluorouridine-3'-phosphate
  modified_base 8: mod_base = OTHER; note = 2'-fluorouridine-3'-phosphate
  modified_base 9: mod_base = OTHER; note = 2'-fluorocytidine-3'-phosphate
  modified_base 19: mod_base = OTHER; note = L96
  source 1..19: mol_type = other RNA
agagtattccatttttact

SEQ ID NO: 1246 - RNA, 21 nt, synthetic construct
  misc_feature 1..21: note = Synthetic
  modified_base 1: mod_base = OTHER; note = 2'-O-methyladenosine-3'- phosphorothioate
  modified_base 2: mod_base = OTHER; note = 2`-deoxyguanosine-3`-phosphorothioate
  modified_base 5: mod_base = OTHER; note = 2`-deoxyadenosine-3`-phosphate
  modified_base 7: mod_base = OTHER; note = 2`-deoxyadenosine-3`-phosphate
  modified_base 14: mod_base = OTHER; note = 2'-fluorouridine-3'-phosphate
  modified_base 16: mod_base = OTHER; note = 2'-fluorocytidine-3'-phosphate
  modified_base 19: mod_base = OTHER; note = 2'-O-methyluridine-3'-phosphorothioate
  modified_base 20: mod_base = OTHER; note = 2'-O-methyluridine-3'- phosphorothioate
  source 1..21: mol_type = other RNA
agtaaaaatggaatactcttg

SEQ ID NO: 1247 - RNA, 21 nt, synthetic construct
  misc_feature 1..21: note = Synthetic
  source 1..21: mol_type = other RNA
caagagtattccatttttact

SEQ ID NO: 1248 - RNA, 21 nt, synthetic construct
  misc_feature 1..21: note = Synthetic
  modified_base 1: mod_base = OTHER; note = 2'-O-methylcytidine-3'- phosphorothioate
  modified_base 2: mod_base = OTHER; note = 2'-O-methyladenosine-3'-phosphorothioate
  modified_base 9: mod_base = OTHER; note = 2'-fluorouridine-3'-phosphate
  modified_base 10: mod_base = OTHER; note = 2'-fluorouridine-3'-phosphate
  modified_base 11: mod_base = OTHER; note = 2'-fluorocytidine-3'-phosphate
  modified_base 21: mod_base = OTHER; note = L96
  source 1..21: mol_type = other RNA
caagagtattccatttttact

SEQ ID NO: 1249 - RNA, 23 nt, synthetic construct
  modified_base 14: mod_base = OTHER; note = thymine
  misc_feature 1..23: note = Synthetic
  modified_base 1: mod_base = OTHER; note = 2'-O-methyladenosine-3'- phosphorothioate
  modified_base 2: mod_base = OTHER; note = 2`-deoxyguanosine-3`-phosphorothioate
  modified_base 5: mod_base = OTHER; note = 2`-deoxyadenosine-3`-phosphate
  modified_base 7: mod_base = OTHER; note = 2`-deoxyadenosine-3`-phosphate
  modified_base 12: mod_base = OTHER; note = 2`-deoxyadenosine-3`-phosphate
  modified_base 14: mod_base = OTHER; note = 2`-deoxythimidine -3`-phosphate
  modified_base 16: mod_base = OTHER; note = 2`-deoxycytidine-3`-phosphate
  modified_base 21: mod_base = OTHER; note = 2'-O-methylguanosine-3'-phosphorothioate
  modified_base 22: mod_base = OTHER; note = 2'-O-methylcytidine-3'- phosphorothioate
  source 1..23: mol_type = other RNA
agtaaaaatggaatactcttgcc

SEQ ID NO: 1250 - RNA, 23 nt, synthetic construct
  misc_feature 1..23: note = Synthetic
  source 1..23: mol_type = other RNA
accaagagtattccatttttact

SEQ ID NO: 1251 - RNA, 19 nt, synthetic construct
  misc_feature 1..19: note = Synthetic
  modified_base 1: mod_base = OTHER; note = 2'-O-methyladenosine-3'- phosphorothioate
  modified_base 2: mod_base = OTHER; note = 2'-O-methylguanosine-3'-phosphorothioate
  modified_base 7: mod_base = OTHER; note = 2'-fluorouridine-3'-phosphate
  modified_base 8: mod_base = OTHER; note = 2'-fluorouridine-3'-phosphate
  modified_base 9: mod_base = OTHER; note = 2'-fluorocytidine-3'-phosphate
  modified_base 19: mod_base = OTHER; note = L96
  source 1..19: mol_type = other RNA
agagtattccatttttact

SEQ ID NO: 1252 - RNA, 21 nt, synthetic construct
  modified_base 14: mod_base = OTHER; note = thymine
  misc_feature 1..21: note = Synthetic
  modified_base 1: mod_base = OTHER; note = 2'-O-methyladenosine-3'- phosphorothioate
  modified_base 2: mod_base = OTHER; note = 2`-deoxyguanosine-3`-phosphorothioate
  modified_base 5: mod_base = OTHER; note = 2`-deoxyadenosine-3`-phosphate
  modified_base 7: mod_base = OTHER; note = 2`-deoxyadenosine-3`-phosphate
  modified_base 12: mod_base = OTHER; note = 2`-deoxyadenosine-3`-phosphate
  modified_base 14: mod_base = OTHER; note = 2`-deoxythimidine -3`-phosphate
  modified_base 16: mod_base = OTHER; note = 2`-deoxycytidine-3`-phosphate
  modified_base 19: mod_base = OTHER; note = 2'-O-methyluridine-3'-phosphorothioate
  modified_base 20: mod_base = OTHER; note = 2'-O-methyluridine-3'- phosphorothioate
  source 1..21: mol_type = other RNA
agtaaaaatggaatactcttg

SEQ ID NO: 1253 - RNA, 21 nt, synthetic construct
  misc_feature 1..21: note = Synthetic
  source 1..21: mol_type = other RNA
caagagtattccatttttact

SEQ ID NO: 1254 - RNA, 21 nt, synthetic construct
  misc_feature 1..21: note = Synthetic
  modified_base 1: mod_base = OTHER; note = 2'-O-methyladenosine-3'- phosphorothioate
  modified_base 2: mod_base = OTHER; note = 2'-O-methylguanosine-3'-phosphorothioate
  modified_base 7: mod_base = OTHER; note = 2'-fluorouridine-3'-phosphate
  modified_base 9: mod_base = OTHER; note = 2'-fluorocytidine-3'-phosphate
  modified_base 10: mod_base = OTHER; note = 2'-fluorocytidine-3'-phosphate
  modified_base 11: mod_base = OTHER; note = 2'-fluoroadenosine-3'-phosphate
  modified_base 21: mod_base = OTHER; note = L96
  source 1..21: mol_type = other RNA
agagtattccatttttactaa

SEQ ID NO: 1255 - RNA, 23 nt, synthetic construct
  misc_feature 1..23: note = Synthetic
  modified_base 1: mod_base = OTHER; note = 2'-O-methyluridine-3'-phosphorothioate
  modified_base 2: mod_base = OTHER; note = 2'-fluorouridine -3'-phosphorothioate
  modified_base 6: mod_base = OTHER; note = 2'-fluoroadenosine-3'-phosphate
  modified_base 7: mod_base = OTHER; note = Adenosine-glycol nucleic acid
  modified_base 14: mod_base = OTHER; note = 2'-fluoroadenosine-3'-phosphate
  modified_base 16: mod_base = OTHER; note = 2'-fluorouridine-3'-phosphate
  modified_base 21: mod_base = OTHER; note = 2'-O-methyluridine-3'- phosphorothioate
  modified_base 22: mod_base = OTHER; note = 2'-O-methyluridine-3'- phosphorothioate
  source 1..23: mol_type = other RNA
ttagtaaaaatggaatactcttg

SEQ ID NO: 1256 - RNA, 23 nt, synthetic construct
  misc_feature 1..23: note = Synthetic
  source 1..23: mol_type = other RNA
caagagtattccatttttactaa

SEQ ID NO: 1257 - RNA, 21 nt, synthetic construct
  misc_feature 1..21: note = Synthetic
  modified_base 1: mod_base = OTHER; note = 2'-O-methyladenosine-3'- phosphorothioate
  modified_base 2: mod_base = OTHER; note = 2'-O-methylguanosine-3'-phosphorothioate
  modified_base 7: mod_base = OTHER; note = 2'-fluorouridine-3'-phosphate
  modified_base 9: mod_base = OTHER; note = 2'-fluorocytidine-3'-phosphate
  modified_base 10: mod_base = OTHER; note = 2'-fluorocytidine-3'-phosphate
  modified_base 11: mod_base = OTHER; note = 2`-deoxyadenosine-3`-phosphate
  modified_base 12: mod_base = OTHER; note = 2'-fluorouridine-3'-phosphate
  modified_base 21: mod_base = OTHER; note = L96
  source 1..21: mol_type = other RNA
agagtattccatttttactaa

SEQ ID NO: 1258 - RNA, 23 nt, synthetic construct
  misc_feature 1..23: note = Synthetic
  modified_base 1: mod_base = OTHER; note = 2'-O-methyluridine-3'-phosphorothioate
  modified_base 2: mod_base = OTHER; note = 2'-fluorouridine -3'-phosphorothioate
  modified_base 6: mod_base = OTHER; note = 2'-fluoroadenosine-3'-phosphate
  modified_base 7: mod_base = OTHER; note = Adenosine-glycol nucleic acid
  modified_base 14: mod_base = OTHER; note = 2'-fluoroadenosine-3'-phosphate
  modified_base 16: mod_base = OTHER; note = 2'-fluorouridine-3'-phosphate
  modified_base 21: mod_base = OTHER; note = 2'-O-methyluridine-3'- phosphorothioate
  modified_base 22: mod_base = OTHER; note = 2'-O-methyluridine-3'- phosphorothioate
  source 1..23: mol_type = other RNA
ttagtaaaaatggaatactcttg

SEQ ID NO: 1259 - RNA, 23 nt, synthetic construct
  misc_feature 1..23: note = Synthetic
  source 1..23: mol_type = other RNA
caagagtattccatttttactaa

SEQ ID NO: 1260 - RNA, 21 nt, synthetic construct
  misc_feature 1..21: note = Synthetic
  modified_base 1: mod_base = OTHER; note = 2'-O-methyladenosine-3'- phosphorothioate
  modified_base 2: mod_base = OTHER; note = 2'-O-methylguanosine-3'-phosphorothioate
  modified_base 7: mod_base = OTHER; note = 2'-fluorouridine-3'-phosphate
  modified_base 9: mod_base = OTHER; note = 2'-fluorocytidine-3'-phosphate
  modified_base 11: mod_base = OTHER; note = 2`-deoxyadenosine-3`-phosphate
  modified_base 12: mod_base = OTHER; note = 2'-fluorouridine-3'-phosphate
  modified_base 21: mod_base = OTHER; note = L96
  source 1..21: mol_type = other RNA
agagtattccatttttactaa

SEQ ID NO: 1261 - RNA, 23 nt, synthetic construct
  misc_feature 1..23: note = Synthetic
  modified_base 1: mod_base = OTHER; note = 2'-O-methyluridine-3'-phosphorothioate
  modified_base 2: mod_base = OTHER; note = 2'-fluorouridine -3'-phosphorothioate
  modified_base 6: mod_base = OTHER; note = 2'-fluoroadenosine-3'-phosphate
  modified_base 7: mod_base = OTHER; note = Adenosine-glycol nucleic acid
  modified_base 14: mod_base = OTHER; note = 2'-fluoroadenosine-3'-phosphate
  modified_base 16: mod_base = OTHER; note = 2'-fluorouridine-3'-phosphate
  modified_base 21: mod_base = OTHER; note = 2'-O-methyluridine-3'- phosphorothioate
  modified_base 22: mod_base = OTHER; note = 2'-O-methyluridine-3'- phosphorothioate
  source 1..23: mol_type = other RNA
ttagtaaaaatggaatactcttg

SEQ ID NO: 1262 - RNA, 23 nt, synthetic construct
  misc_feature 1..23: note = Synthetic
  source 1..23: mol_type = other RNA
caagagtattccatttttactaa

SEQ ID NO: 1263 - RNA, 21 nt, synthetic construct
  misc_feature 1..21: note = Synthetic
  modified_base 1: mod_base = OTHER; note = 2'-O-methyladenosine-3'- phosphorothioate
  modified_base 2: mod_base = OTHER; note = 2'-O-methylguanosine-3'-phosphorothioate
  modified_base 7: mod_base = OTHER; note = 2'-fluorouridine-3'-phosphate
  modified_base 9: mod_base = OTHER; note = 2'-fluorocytidine-3'-phosphate
  modified_base 10: mod_base = OTHER; note = 2'-fluorocytidine-3'-phosphate
  modified_base 11: mod_base = OTHER; note = 2'-fluoroadenosine-3'-phosphate
  modified_base 21: mod_base = OTHER; note = L96
  source 1..21: mol_type = other RNA
agagtattccatttttactat

SEQ ID NO: 1264 - RNA, 23 nt, synthetic construct
  misc_feature 1..23: note = Synthetic
  modified_base 1: mod_base = OTHER; note = 2'-O-methyladenosine-3'-phosphorothioate
  modified_base 2: mod_base = OTHER; note = 2'-fluorouridine -3'-phosphorothioate
  modified_base 6: mod_base = OTHER; note = 2'-fluoroadenosine-3'-phosphate
  modified_base 7: mod_base = OTHER; note = Adenosine-glycol nucleic acid
  modified_base 14: mod_base = OTHER; note = 2'-fluoroadenosine-3'-phosphate
  modified_base 16: mod_base = OTHER; note = 2'-fluorouridine-3'-phosphate
  modified_base 21: mod_base = OTHER; note = 2'-O-methyluridine-3'- phosphorothioate
  modified_base 22: mod_base = OTHER; note = 2'-O-methyluridine-3'- phosphorothioate
  source 1..23: mol_type = other RNA
atagtaaaaatggaatactcttg

SEQ ID NO: 1265 - RNA, 23 nt, synthetic construct
  misc_feature 1..23: note = Synthetic
  source 1..23: mol_type = other RNA
caagagtattccatttttactaa

SEQ ID NO: 1266 - RNA, 21 nt, synthetic construct
  misc_feature 1..21: note = Synthetic
  modified_base 1: mod_base = OTHER; note = 2'-O-methyladenosine-3'- phosphorothioate
  modified_base 2: mod_base = OTHER; note = 2'-O-methylguanosine-3'-phosphorothioate
  modified_base 7: mod_base = OTHER; note = 2'-fluorouridine-3'-phosphate
  modified_base 9: mod_base = OTHER; note = 2'-fluorocytidine-3'-phosphate
  modified_base 10: mod_base = OTHER; note = 2'-fluorocytidine-3'-phosphate
  modified_base 11: mod_base = OTHER; note = 2'-fluoroadenosine-3'-phosphate
  modified_base 21: mod_base = OTHER; note = L96
  source 1..21: mol_type = other RNA
agagtattccatttttactaa

SEQ ID NO: 1267 - RNA, 23 nt, synthetic construct
  modified_base 5: mod_base = OTHER; note = thymine
  misc_feature 1..23: note = Synthetic
  modified_base 1: mod_base = OTHER; note = 2'-O-methyluridine-3'-phosphorothioate
  modified_base 2: mod_base = OTHER; note = 2'-fluorouridine -3'-phosphorothioate
  modified_base 5: mod_base = OTHER; note = 2`-deoxythimidine -3`-phosphate
  modified_base 7: mod_base = OTHER; note = Adenosine-glycol nucleic acid
  modified_base 14: mod_base = OTHER; note = 2'-fluoroadenosine-3'-phosphate
  modified_base 16: mod_base = OTHER; note = 2'-fluorouridine-3'-phosphate
  modified_base 21: mod_base = OTHER; note = 2'-O-methyluridine-3'- phosphorothioate
  modified_base 22: mod_base = OTHER; note = 2'-O-methyluridine-3'- phosphorothioate
  source 1..23: mol_type = other RNA
ttagtaaaaatggaatactcttg

SEQ ID NO: 1268 - RNA, 23 nt, synthetic construct
  misc_feature 1..23: note = Synthetic
  source 1..23: mol_type = other RNA
caagagtattccatttttactaa

SEQ ID NO: 1269 - RNA, 21 nt, synthetic construct
  misc_feature 1..21: note = Synthetic
  modified_base 1: mod_base = OTHER; note = 2'-O-methyladenosine-3'- phosphorothioate
  modified_base 2: mod_base = OTHER; note = 2'-O-methylguanosine-3'-phosphorothioate
  modified_base 7: mod_base = OTHER; note = 2'-fluorouridine-3'-phosphate
  modified_base 9: mod_base = OTHER; note = 2'-fluorocytidine-3'-phosphate
  modified_base 10: mod_base = OTHER; note = 2'-fluorocytidine-3'-phosphate
  modified_base 11: mod_base = OTHER; note = 2'-fluoroadenosine-3'-phosphate
  modified_base 21: mod_base = OTHER; note = L96
  source 1..21: mol_type = other RNA
agagtattccatttttactaa

SEQ ID NO: 1270 - RNA, 23 nt, synthetic construct
  misc_feature 1..23: note = Synthetic
  modified_base 1: mod_base = OTHER; note = 2'-O-methyluridine-3'-phosphorothioate
  modified_base 2: mod_base = OTHER; note = 2'-fluorouridine -3'-phosphorothioate
  modified_base 6: mod_base = OTHER; note = 2'-fluoroadenosine-3'-phosphate
  modified_base 7: mod_base = OTHER; note = Adenosine-glycol nucleic acid
  modified_base 14: mod_base = OTHER; note = 2'-fluoroadenosine-3'-phosphate
  modified_base 16: mod_base = OTHER; note = 2'-fluorouridine-3'-phosphate
  modified_base 21: mod_base = OTHER; note = 2'-O-methyluridine-3'- phosphorothioate
  modified_base 22: mod_base = OTHER; note = 2'-O-methyluridine-3'- phosphorothioate
  source 1..23: mol_type = other RNA
ttagtaaaaatggaatactcttg

SEQ ID NO: 1271 - RNA, 23 nt, synthetic construct
  misc_feature 1..23: note = Synthetic
  source 1..23: mol_type = other RNA
caagagtattccatttttactaa

SEQ ID NO: 1272 - RNA, 21 nt, synthetic construct
  misc_feature 1..21: note = Synthetic
  modified_base 1: mod_base = OTHER; note = 2'-O-methyladenosine-3'- phosphorothioate
  modified_base 2: mod_base = OTHER; note = 2'-O-methylguanosine-3'-phosphorothioate
  modified_base 7: mod_base = OTHER; note = 2'-fluorouridine-3'-phosphate
  modified_base 9: mod_base = OTHER; note = 2'-fluorocytidine-3'-phosphate
  modified_base 10: mod_base = OTHER; note = 2'-fluorocytidine-3'-phosphate
  modified_base 11: mod_base = OTHER; note = 2'-fluoroadenosine-3'-phosphate
  modified_base 21: mod_base = OTHER; note = L96
  source 1..21: mol_type = other RNA
agagtattccatttttactaa

SEQ ID NO: 1273 - RNA, 23 nt, synthetic construct
  modified_base 5: mod_base = OTHER; note = thymine
  misc_feature 1..23: note = Synthetic
  modified_base 1: mod_base = OTHER; note = 2'-O-methyluridine-3'-phosphorothioate
  modified_base 2: mod_base = OTHER; note = 2'-fluorouridine -3'-phosphorothioate
  modified_base 5: mod_base = OTHER; note = 2`-deoxythimidine -3`-phosphate
  modified_base 7: mod_base = OTHER; note = Adenosine-glycol nucleic acid
  modified_base 14: mod_base = OTHER; note = 2'-fluoroadenosine-3'-phosphate
  modified_base 16: mod_base = OTHER; note = 2'-fluorouridine-3'-phosphate
  modified_base 21: mod_base = OTHER; note = 2'-O-methyluridine-3'- phosphorothioate
  modified_base 22: mod_base = OTHER; note = 2'-O-methyluridine-3'- phosphorothioate
  source 1..23: mol_type = other RNA
ttagtaaaaatggaatactcttg

SEQ ID NO: 1274 - RNA, 23 nt, synthetic construct
  misc_feature 1..23: note = Synthetic
  source 1..23: mol_type = other RNA
caagagtattccatttttactaa

SEQ ID NO: 1275 - RNA, 21 nt, synthetic construct
  misc_feature 1..21: note = Synthetic
  modified_base 1: mod_base = OTHER; note = 2'-O-methyladenosine-3'- phosphorothioate
  modified_base 2: mod_base = OTHER; note = 2'-O-methylguanosine-3'-phosphorothioate
  modified_base 7: mod_base = OTHER; note = 2'-fluorouridine-3'-phosphate
  modified_base 9: mod_base = OTHER; note = 2'-fluorocytidine-3'-phosphate
  modified_base 10: mod_base = OTHER; note = 2'-fluorocytidine-3'-phosphate
  modified_base 11: mod_base = OTHER; note = 2'-fluoroadenosine-3'-phosphate
  modified_base 21: mod_base = OTHER; note = L96
  source 1..21: mol_type = other RNA
agagtattccatttttactaa

SEQ ID NO: 1276 - RNA, 23 nt, synthetic construct
  misc_feature 1..23: note = Synthetic
  modified_base 1: mod_base = OTHER; note = 2'-O-methyluridine-3'-phosphorothioate
  modified_base 2: mod_base = OTHER; note = 2'-fluorouridine -3'-phosphorothioate
  modified_base 6: mod_base = OTHER; note = 2'-fluoroadenosine-3'-phosphate
  modified_base 7: mod_base = OTHER; note = Adenosine-glycol nucleic acid
  modified_base 14: mod_base = OTHER; note = 2`-deoxyadenosine-3`-phosphate
  modified_base 16: mod_base = OTHER; note = 2'-fluorouridine-3'-phosphate
  modified_base 21: mod_base = OTHER; note = 2'-O-methyluridine-3'- phosphorothioate
  modified_base 22: mod_base = OTHER; note = 2'-O-methyluridine-3'- phosphorothioate
  source 1..23: mol_type = other RNA
ttagtaaaaatggaatactcttg

SEQ ID NO: 1277 - RNA, 23 nt, synthetic construct
  misc_feature 1..23: note = Synthetic
  source 1..23: mol_type = other RNA
caagagtattccatttttactaa

SEQ ID NO: 1278 - RNA, 21 nt, synthetic construct
  misc_feature 1..21: note = Synthetic
  modified_base 1: mod_base = OTHER; note = 2'-O-methyladenosine-3'- phosphorothioate
  modified_base 2: mod_base = OTHER; note = 2'-O-methylguanosine-3'-phosphorothioate
  modified_base 7: mod_base = OTHER; note = 2'-fluorouridine-3'-phosphate
  modified_base 9: mod_base = OTHER; note = 2'-fluorocytidine-3'-phosphate
  modified_base 10: mod_base = OTHER; note = 2'-fluorocytidine-3'-phosphate
  modified_base 11: mod_base = OTHER; note = 2'-fluoroadenosine-3'-phosphate
  modified_base 21: mod_base = OTHER; note = L96
  source 1..21: mol_type = other RNA
agagtattccatttttactaa

SEQ ID NO: 1279 - RNA, 23 nt, synthetic construct
  misc_feature 1..23: note = Synthetic
  modified_base 1: mod_base = OTHER; note = 2'-O-methyluridine-3'-phosphorothioate
  modified_base 2: mod_base = OTHER; note = 2'-fluorouridine -3'-phosphorothioate
  modified_base 6: mod_base = OTHER; note = 2'-fluoroadenosine-3'-phosphate
  modified_base 7: mod_base = OTHER; note = Adenosine-glycol nucleic acid
  modified_base 14: mod_base = OTHER; note = 2'-fluoroadenosine-3'-phosphate
  modified_base 16: mod_base = OTHER; note = 2'-fluorouridine-3'-phosphate
  modified_base 21: mod_base = OTHER; note = 2'-O-methyluridine-3'- phosphorothioate
  modified_base 22: mod_base = OTHER; note = 2'-O-methylcytidine-3'- phosphorothioate
  source 1..23: mol_type = other RNA
ttagtaaaaatggaatactctcc

SEQ ID NO: 1280 - RNA, 23 nt, synthetic construct
  misc_feature 1..23: note = Synthetic
  source 1..23: mol_type = other RNA
caagagtattccatttttactaa

SEQ ID NO: 1281 - RNA, 19 nt, synthetic construct
  misc_feature 1..19: note = Synthetic
  modified_base 1: mod_base = OTHER; note = 2'-O-methyladenosine-3'- phosphorothioate
  modified_base 2: mod_base = OTHER; note = 2'-O-methylguanosine-3'-phosphorothioate
  modified_base 5: mod_base = OTHER; note = 2'-fluorouridine-3'-phosphate
  modified_base 7: mod_base = OTHER; note = 2'-fluorocytidine-3'-phosphate
  modified_base 8: mod_base = OTHER; note = 2'-fluorocytidine-3'-phosphate
  modified_base 9: mod_base = OTHER; note = 2'-fluoroadenosine-3'-phosphate
  modified_base 19: mod_base = OTHER; note = L96
  source 1..19: mol_type = other RNA
agtattccatttttactaa

SEQ ID NO: 1282 - RNA, 21 nt, synthetic construct
  misc_feature 1..21: note = Synthetic
  modified_base 1: mod_base = OTHER; note = 2'-O-methyluridine-3'-phosphorothioate
  modified_base 2: mod_base = OTHER; note = 2'-fluorouridine -3'-phosphorothioate
  modified_base 6: mod_base = OTHER; note = 2'-fluoroadenosine-3'-phosphate
  modified_base 7: mod_base = OTHER; note = Adenosine-glycol nucleic acid
  modified_base 14: mod_base = OTHER; note = 2'-fluoroadenosine-3'-phosphate
  modified_base 16: mod_base = OTHER; note = 2'-fluorouridine-3'-phosphate
  modified_base 19: mod_base = OTHER; note = 2'-O-methyluridine-3'- phosphorothioate
  modified_base 20: mod_base = OTHER; note = 2'-O-methylcytidine-3'- phosphorothioate
  source 1..21: mol_type = other RNA
ttagtaaaaatggaatactct

SEQ ID NO: 1283 - RNA, 21 nt, synthetic construct
  misc_feature 1..21: note = Synthetic
  source 1..21: mol_type = other RNA
agagtattccatttttactaa

SEQ ID NO: 1284 - RNA, 21 nt, synthetic construct
  misc_feature 1..21: note = Synthetic
  modified_base 1: mod_base = OTHER; note = 2'-O-methyladenosine-3'- phosphorothioate
  modified_base 2: mod_base = OTHER; note = 2'-O-methylguanosine-3'-phosphorothioate
  modified_base 7: mod_base = OTHER; note = 2'-fluorouridine-3'-phosphate
  modified_base 9: mod_base = OTHER; note = 2'-fluorocytidine-3'-phosphate
  modified_base 10: mod_base = OTHER; note = 2'-fluorocytidine-3'-phosphate
  modified_base 11: mod_base = OTHER; note = 2'-fluoroadenosine-3'-phosphate
  modified_base 21: mod_base = OTHER; note = L96
  source 1..21: mol_type = other RNA
agagtattccatttttactat

SEQ ID NO: 1285 - RNA, 23 nt, synthetic construct
  modified_base 5: mod_base = OTHER; note = thymine
  misc_feature 1..23: note = Synthetic
  modified_base 1: mod_base = OTHER; note = 2'-O-methyladenosine-3'-phosphorothioate
  modified_base 2: mod_base = OTHER; note = 2'-fluorouridine -3'-phosphorothioate
  modified_base 5: mod_base = OTHER; note = 2`-deoxythimidine -3`-phosphate
  modified_base 7: mod_base = OTHER; note = Adenosine-glycol nucleic acid
  modified_base 14: mod_base = OTHER; note = 2'-fluoroadenosine-3'-phosphate
  modified_base 16: mod_base = OTHER; note = 2'-fluorouridine-3'-phosphate
  modified_base 21: mod_base = OTHER; note = 2'-O-methyluridine-3'- phosphorothioate
  modified_base 22: mod_base = OTHER; note = 2'-O-methyluridine-3'- phosphorothioate
  source 1..23: mol_type = other RNA
atagtaaaaatggaatactcttg

SEQ ID NO: 1286 - RNA, 23 nt, synthetic construct
  misc_feature 1..23: note = Synthetic
  source 1..23: mol_type = other RNA
caagagtattccatttttactaa

SEQ ID NO: 1287 - RNA, 21 nt, synthetic construct
  misc_feature 1..21: note = Synthetic
  modified_base 1: mod_base = OTHER; note = 2'-O-methyladenosine-3'- phosphorothioate
  modified_base 2: mod_base = OTHER; note = 2'-O-methylguanosine-3'-phosphorothioate
  modified_base 7: mod_base = OTHER; note = 2'-fluorouridine-3'-phosphate
  modified_base 9: mod_base = OTHER; note = 2'-fluorocytidine-3'-phosphate
  modified_base 10: mod_base = OTHER; note = 2'-fluorocytidine-3'-phosphate
  modified_base 11: mod_base = OTHER; note = 2'-fluoroadenosine-3'-phosphate
  modified_base 21: mod_base = OTHER; note = L96
  source 1..21: mol_type = other RNA
agagtattccatttttactat

SEQ ID NO: 1288 - RNA, 23 nt, synthetic construct
  modified_base 5: mod_base = OTHER; note = thymine
  misc_feature 1..23: note = Synthetic
  modified_base 1: mod_base = OTHER; note = 2'-O-methyladenosine-3'-phosphorothioate
  modified_base 2: mod_base = OTHER; note = 2'-fluorouridine -3'-phosphorothioate
  modified_base 5: mod_base = OTHER; note = 2`-deoxythimidine -3`-phosphate
  modified_base 7: mod_base = OTHER; note = Adenosine-glycol nucleic acid
  modified_base 14: mod_base = OTHER; note = 2`-deoxyadenosine-3`-phosphate
  modified_base 16: mod_base = OTHER; note = 2'-fluorouridine-3'-phosphate
  modified_base 21: mod_base = OTHER; note = 2'-O-methyluridine-3'- phosphorothioate
  modified_base 22: mod_base = OTHER; note = 2'-O-methyluridine-3'- phosphorothioate
  source 1..23: mol_type = other RNA
atagtaaaaatggaatactcttg

SEQ ID NO: 1289 - RNA, 23 nt, synthetic construct
  misc_feature 1..23: note = Synthetic
  source 1..23: mol_type = other RNA
caagagtattccatttttactaa

SEQ ID NO: 1290 - RNA, 21 nt, synthetic construct
  misc_feature 1..21: note = Synthetic
  modified_base 1: mod_base = OTHER; note = 2'-O-methyladenosine-3'- phosphorothioate
  modified_base 2: mod_base = OTHER; note = 2'-O-methylguanosine-3'-phosphorothioate
  modified_base 7: mod_base = OTHER; note = 2'-fluorouridine-3'-phosphate
  modified_base 9: mod_base = OTHER; note = 2'-fluorocytidine-3'-phosphate
  modified_base 10: mod_base = OTHER; note = 2'-fluorocytidine-3'-phosphate
  modified_base 11: mod_base = OTHER; note = 2'-fluoroadenosine-3'-phosphate
  modified_base 21: mod_base = OTHER; note = L96
  source 1..21: mol_type = other RNA
agagtattccatttttactat

SEQ ID NO: 1291 - RNA, 23 nt, synthetic construct
  modified_base 5: mod_base = OTHER; note = thymine
  misc_feature 1..23: note = Synthetic
  modified_base 1: mod_base = OTHER; note = 2'-O-methyladenosine-3'- phosphorothioate
  modified_base 2: mod_base = OTHER; note = 2'-fluorouridine-3'-phosphorothioate
  modified_base 5: mod_base = OTHER; note = 2`-deoxythimidine -3`-phosphate
  modified_base 7: mod_base = OTHER; note = adenosine-2`-phosphate
  modified_base 14: mod_base = OTHER; note = 2'-fluoroadenosine-3'-phosphate
  modified_base 16: mod_base = OTHER; note = 2'-fluorouridine-3'-phosphate
  modified_base 21: mod_base = OTHER; note = 2'-O-methyluridine-3'- phosphorothioate
  modified_base 22: mod_base = OTHER; note = 2'-O-methyluridine-3'- phosphorothioate
  source 1..23: mol_type = other RNA
atagtaaaaatggaatactcttg

SEQ ID NO: 1292 - RNA, 23 nt, synthetic construct
  misc_feature 1..23: note = Synthetic
  source 1..23: mol_type = other RNA
caagagtattccatttttactaa

SEQ ID NO: 1293 - RNA, 21 nt, synthetic construct
  misc_feature 1..21: note = Synthetic
  modified_base 1: mod_base = OTHER; note = 2'-O-methyladenosine-3'- phosphorothioate
  modified_base 2: mod_base = OTHER; note = 2'-O-methylguanosine-3'-phosphorothioate
  modified_base 7: mod_base = OTHER; note = 2'-fluorouridine-3'-phosphate
  modified_base 9: mod_base = OTHER; note = 2'-fluorocytidine-3'-phosphate
  modified_base 10: mod_base = OTHER; note = 2'-fluorocytidine-3'-phosphate
  modified_base 11: mod_base = OTHER; note = 2'-fluoroadenosine-3'-phosphate
  modified_base 21: mod_base = OTHER; note = L96
  source 1..21: mol_type = other RNA
agagtattccatttttactat

SEQ ID NO: 1294 - RNA, 23 nt, synthetic construct
  modified_base 5: mod_base = OTHER; note = thymine
  misc_feature 1..23: note = Synthetic
  modified_base 1: mod_base = OTHER; note = 2'-O-methyladenosine-3'- phosphorothioate
  modified_base 2: mod_base = OTHER; note = 2'-fluorouridine-3'-phosphorothioate
  modified_base 5: mod_base = OTHER; note = 2`-deoxythimidine -3`-phosphate
  modified_base 7: mod_base = OTHER; note = adenosine-2`-phosphate
  modified_base 14: mod_base = OTHER; note = 2`-deoxyadenosine-3`-phosphate
  modified_base 16: mod_base = OTHER; note = 2'-fluorouridine-3'-phosphate
  modified_base 21: mod_base = OTHER; note = 2'-O-methyluridine-3'- phosphorothioate
  modified_base 22: mod_base = OTHER; note = 2'-O-methyluridine-3'- phosphorothioate
  source 1..23: mol_type = other RNA
atagtaaaaatggaatactcttg

SEQ ID NO: 1295 - RNA, 23 nt, synthetic construct
  misc_feature 1..23: note = Synthetic
  source 1..23: mol_type = other RNA
caagagtattccatttttactaa

SEQ ID NO: 1296 - RNA, 21 nt, synthetic construct
  misc_feature 1..21: note = Synthetic
  modified_base 1: mod_base = OTHER; note = 2'-O-methyladenosine-3'- phosphorothioate
  modified_base 2: mod_base = OTHER; note = 2'-O-methylguanosine-3'-phosphorothioate
  modified_base 7: mod_base = OTHER; note = 2'-fluorouridine-3'-phosphate
  modified_base 9: mod_base = OTHER; note = 2'-fluorocytidine-3'-phosphate
  modified_base 10: mod_base = OTHER; note = 2'-fluorocytidine-3'-phosphate
  modified_base 11: mod_base = OTHER; note = 2`-deoxyadenosine-3`-phosphate
  modified_base 21: mod_base = OTHER; note = L96
  source 1..21: mol_type = other RNA
agagtattccatttttactat

SEQ ID NO: 1297 - RNA, 23 nt, synthetic construct
  modified_base 5: mod_base = OTHER; note = thymine
  misc_feature 1..23: note = Synthetic
  modified_base 1: mod_base = OTHER; note = 2'-O-methyladenosine-3'-phosphorothioate
  modified_base 2: mod_base = OTHER; note = 2'-fluorouridine -3'-phosphorothioate
  modified_base 5: mod_base = OTHER; note = 2`-deoxythimidine -3`-phosphate
  modified_base 7: mod_base = OTHER; note = Adenosine-glycol nucleic acid
  modified_base 14: mod_base = OTHER; note = 2'-fluoroadenosine-3'-phosphate
  modified_base 16: mod_base = OTHER; note = 2'-fluorouridine-3'-phosphate
  modified_base 21: mod_base = OTHER; note = 2'-O-methyluridine-3'- phosphorothioate
  modified_base 22: mod_base = OTHER; note = 2'-O-methyluridine-3'- phosphorothioate
  source 1..23: mol_type = other RNA
atagtaaaaatggaatactcttg

SEQ ID NO: 1298 - RNA, 23 nt, synthetic construct
  misc_feature 1..23: note = Synthetic
  source 1..23: mol_type = other RNA
caagagtattccatttttactaa

SEQ ID NO: 1299 - RNA, 21 nt, synthetic construct
  misc_feature 1..21: note = Synthetic
  modified_base 1: mod_base = OTHER; note = 2'-O-methyladenosine-3'- phosphorothioate
  modified_base 2: mod_base = OTHER; note = 2'-O-methylguanosine-3'-phosphorothioate
  modified_base 7: mod_base = OTHER; note = 2'-fluorouridine-3'-phosphate
  modified_base 9: mod_base = OTHER; note = 2'-fluorocytidine-3'-phosphate
  modified_base 10: mod_base = OTHER; note = 2'-fluorocytidine-3'-phosphate
  modified_base 11: mod_base = OTHER; note = 2`-deoxyadenosine-3`-phosphate
  modified_base 21: mod_base = OTHER; note = L96
  source 1..21: mol_type = other RNA
agagtattccatttttactat

SEQ ID NO: 1300 - RNA, 23 nt, synthetic construct
  modified_base 5: mod_base = OTHER; note = thymine
  misc_feature 1..23: note = Synthetic
  modified_base 1: mod_base = OTHER; note = 2'-O-methyladenosine-3'-phosphorothioate
  modified_base 2: mod_base = OTHER; note = 2'-fluorouridine -3'-phosphorothioate
  modified_base 5: mod_base = OTHER; note = 2`-deoxythimidine -3`-phosphate
  modified_base 7: mod_base = OTHER; note = Adenosine-glycol nucleic acid
  modified_base 14: mod_base = OTHER; note = 2`-deoxyadenosine-3`-phosphate
  modified_base 16: mod_base = OTHER; note = 2'-fluorouridine-3'-phosphate
  modified_base 21: mod_base = OTHER; note = 2'-O-methyluridine-3'- phosphorothioate
  modified_base 22: mod_base = OTHER; note = 2'-O-methyluridine-3'- phosphorothioate
  source 1..23: mol_type = other RNA
atagtaaaaatggaatactcttg

SEQ ID NO: 1301 - RNA, 23 nt, synthetic construct
  misc_feature 1..23: note = Synthetic
  source 1..23: mol_type = other RNA
caagagtattccatttttactaa

SEQ ID NO: 1302 - RNA, 21 nt, synthetic construct
  misc_feature 1..21: note = Synthetic
  modified_base 1: mod_base = OTHER; note = 2'-O-methyladenosine-3'- phosphorothioate
  modified_base 2: mod_base = OTHER; note = 2'-O-methylguanosine-3'-phosphorothioate
  modified_base 7: mod_base = OTHER; note = 2'-fluorouridine-3'-phosphate
  modified_base 9: mod_base = OTHER; note = 2'-fluorocytidine-3'-phosphate
  modified_base 10: mod_base = OTHER; note = 2'-fluorocytidine-3'-phosphate
  modified_base 11: mod_base = OTHER; note = 2`-deoxyadenosine-3`-phosphate
  modified_base 21: mod_base = OTHER; note = L96
  source 1..21: mol_type = other RNA
agagtattccatttttactat

SEQ ID NO: 1303 - RNA, 23 nt, synthetic construct
  modified_base 5: mod_base = OTHER; note = thymine
  misc_feature 1..23: note = Synthetic
  modified_base 1: mod_base = OTHER; note = 2'-O-methyladenosine-3'-phosphorothioate
  modified_base 2: mod_base = OTHER; note = 2'-fluorouridine -3'-phosphorothioate
  modified_base 5: mod_base = OTHER; note = 2`-deoxythimidine -3`-phosphate
  modified_base 7: mod_base = OTHER; note = Adenosine-glycol nucleic acid
  modified_base 14: mod_base = OTHER; note = 2'-fluoroadenosine-3'-phosphate
  modified_base 16: mod_base = OTHER; note = 2'-fluorouridine-3'-phosphate
  modified_base 21: mod_base = OTHER; note = 2'-O-methyluridine-3'- phosphorothioate
  modified_base 22: mod_base = OTHER; note = 2'-O-methyluridine-3'- phosphorothioate
  source 1..23: mol_type = other RNA
atagtaaaaatggaatactcttg

SEQ ID NO: 1304 - RNA, 23 nt, synthetic construct
  misc_feature 1..23: note = Synthetic
  source 1..23: mol_type = other RNA
caagagtattccatttttactaa

SEQ ID NO: 1305 - RNA, 21 nt, synthetic construct
  misc_feature 1..21: note = Synthetic
  modified_base 1: mod_base = OTHER; note = 2'-O-methyladenosine-3'- phosphorothioate
  modified_base 2: mod_base = OTHER; note = 2'-O-methylguanosine-3'-phosphorothioate
  modified_base 7: mod_base = OTHER; note = 2'-fluorouridine-3'-phosphate
  modified_base 9: mod_base = OTHER; note = 2'-fluorocytidine-3'-phosphate
  modified_base 10: mod_base = OTHER; note = 2'-fluorocytidine-3'-phosphate
  modified_base 11: mod_base = OTHER; note = 2`-deoxyadenosine-3`-phosphate
  modified_base 21: mod_base = OTHER; note = L96
  source 1..21: mol_type = other RNA
agagtattccatttttactat

SEQ ID NO: 1306 - RNA, 23 nt, synthetic construct
  modified_base 5: mod_base = OTHER; note = thymine
  misc_feature 1..23: note = Synthetic
  modified_base 1: mod_base = OTHER; note = 2'-O-methyladenosine-3'- phosphorothioate
  modified_base 2: mod_base = OTHER; note = 2'-fluorouridine-3'-phosphorothioate
  modified_base 5: mod_base = OTHER; note = 2`-deoxythimidine -3`-phosphate
  modified_base 7: mod_base = OTHER; note = adenosine-2`-phosphate
  modified_base 14: mod_base = OTHER; note = 2`-deoxyadenosine-3`-phosphate
  modified_base 16: mod_base = OTHER; note = 2'-fluorouridine-3'-phosphate
  modified_base 21: mod_base = OTHER; note = 2'-O-methyluridine-3'- phosphorothioate
  modified_base 22: mod_base = OTHER; note = 2'-O-methyluridine-3'- phosphorothioate
  source 1..23: mol_type = other RNA
atagtaaaaatggaatactcttg

SEQ ID NO: 1307 - RNA, 23 nt, synthetic construct
  misc_feature 1..23: note = Synthetic
  source 1..23: mol_type = other RNA
caagagtattccatttttactaa

SEQ ID NO: 1308 - RNA, 21 nt, synthetic construct
  misc_feature 1..21: note = Synthetic
  modified_base 1: mod_base = OTHER; note = 2'-O-methyladenosine-3'- phosphorothioate
  modified_base 2: mod_base = OTHER; note = 2'-O-methylguanosine-3'-phosphorothioate
  modified_base 7: mod_base = OTHER; note = 2'-fluorouridine-3'-phosphate
  modified_base 9: mod_base = OTHER; note = 2'-fluorocytidine-3'-phosphate
  modified_base 11: mod_base = OTHER; note = 2`-deoxyadenosine-3`-phosphate
  modified_base 12: mod_base = OTHER; note = 2'-fluorouridine-3'-phosphate
  modified_base 21: mod_base = OTHER; note = L96
  source 1..21: mol_type = other RNA
agagtattccatttttactat

SEQ ID NO: 1309 - RNA, 23 nt, synthetic construct
  modified_base 5: mod_base = OTHER; note = thymine
  misc_feature 1..23: note = Synthetic
  modified_base 1: mod_base = OTHER; note = 2'-O-methyladenosine-3'-phosphorothioate
  modified_base 2: mod_base = OTHER; note = 2'-fluorouridine -3'-phosphorothioate
  modified_base 5: mod_base = OTHER; note = 2`-deoxythimidine -3`-phosphate
  modified_base 7: mod_base = OTHER; note = Adenosine-glycol nucleic acid
  modified_base 14: mod_base = OTHER; note = 2'-fluoroadenosine-3'-phosphate
  modified_base 16: mod_base = OTHER; note = 2'-fluorouridine-3'-phosphate
  modified_base 21: mod_base = OTHER; note = 2'-O-methyluridine-3'- phosphorothioate
  modified_base 22: mod_base = OTHER; note = 2'-O-methyluridine-3'- phosphorothioate
  source 1..23: mol_type = other RNA
atagtaaaaatggaatactcttg

SEQ ID NO: 1310 - RNA, 23 nt, synthetic construct
  misc_feature 1..23: note = Synthetic
  source 1..23: mol_type = other RNA
caagagtattccatttttactaa

SEQ ID NO: 1311 - RNA, 21 nt, synthetic construct
  misc_feature 1..21: note = Synthetic
  modified_base 1: mod_base = OTHER; note = 2'-O-methyladenosine-3'- phosphorothioate
  modified_base 2: mod_base = OTHER; note = 2'-O-methylguanosine-3'-phosphorothioate
  modified_base 7: mod_base = OTHER; note = 2'-fluorouridine-3'-phosphate
  modified_base 9: mod_base = OTHER; note = 2'-fluorocytidine-3'-phosphate
  modified_base 11: mod_base = OTHER; note = 2`-deoxyadenosine-3`-phosphate
  modified_base 12: mod_base = OTHER; note = 2'-fluorouridine-3'-phosphate
  modified_base 21: mod_base = OTHER; note = L96
  source 1..21: mol_type = other RNA
agagtattccatttttactat

SEQ ID NO: 1312 - RNA, 23 nt, synthetic construct
  modified_base 5: mod_base = OTHER; note = thymine
  misc_feature 1..23: note = Synthetic
  modified_base 1: mod_base = OTHER; note = 2'-O-methyladenosine-3'-phosphorothioate
  modified_base 2: mod_base = OTHER; note = 2'-fluorouridine -3'-phosphorothioate
  modified_base 5: mod_base = OTHER; note = 2`-deoxythimidine -3`-phosphate
  modified_base 7: mod_base = OTHER; note = Adenosine-glycol nucleic acid
  modified_base 14: mod_base = OTHER; note = 2`-deoxyadenosine-3`-phosphate
  modified_base 16: mod_base = OTHER; note = 2'-fluorouridine-3'-phosphate
  modified_base 21: mod_base = OTHER; note = 2'-O-methyluridine-3'- phosphorothioate
  modified_base 22: mod_base = OTHER; note = 2'-O-methyluridine-3'- phosphorothioate
  source 1..23: mol_type = other RNA
atagtaaaaatggaatactcttg

SEQ ID NO: 1313 - RNA, 23 nt, synthetic construct
  misc_feature 1..23: note = Synthetic
  source 1..23: mol_type = other RNA
caagagtattccatttttactaa

SEQ ID NO: 1314 - RNA, 21 nt, synthetic construct
  misc_feature 1..21: note = Synthetic
  modified_base 1: mod_base = OTHER; note = 2'-O-methyladenosine-3'- phosphorothioate
  modified_base 2: mod_base = OTHER; note = 2'-O-methylguanosine-3'-phosphorothioate
  modified_base 7: mod_base = OTHER; note = 2'-fluorouridine-3'-phosphate
  modified_base 9: mod_base = OTHER; note = 2'-fluorocytidine-3'-phosphate
  modified_base 11: mod_base = OTHER; note = 2`-deoxyadenosine-3`-phosphate
  modified_base 12: mod_base = OTHER; note = 2'-fluorouridine-3'-phosphate
  modified_base 21: mod_base = OTHER; note = L96
  source 1..21: mol_type = other RNA
agagtattccatttttactat

SEQ ID NO: 1315 - RNA, 23 nt, synthetic construct
  modified_base 5: mod_base = OTHER; note = thymine
  misc_feature 1..23: note = Synthetic
  modified_base 1: mod_base = OTHER; note = 2'-O-methyladenosine-3'- phosphorothioate
  modified_base 2: mod_base = OTHER; note = 2'-fluorouridine-3'-phosphorothioate
  modified_base 5: mod_base = OTHER; note = 2`-deoxythimidine -3`-phosphate
  modified_base 7: mod_base = OTHER; note = adenosine-2`-phosphate
  modified_base 14: mod_base = OTHER; note = 2'-fluoroadenosine-3'-phosphate
  modified_base 16: mod_base = OTHER; note = 2'-fluorouridine-3'-phosphate
  modified_base 21: mod_base = OTHER; note = 2'-O-methyluridine-3'- phosphorothioate
  modified_base 22: mod_base = OTHER; note = 2'-O-methyluridine-3'- phosphorothioate
  source 1..23: mol_type = other RNA
atagtaaaaatggaatactcttg

SEQ ID NO: 1316 - RNA, 23 nt, synthetic construct
  misc_feature 1..23: note = Synthetic
  source 1..23: mol_type = other RNA
caagagtattccatttttactaa

SEQ ID NO: 1317 - RNA, 21 nt, synthetic construct
  misc_feature 1..21: note = Synthetic
  modified_base 1: mod_base = OTHER; note = 2'-O-methyladenosine-3'- phosphorothioate
  modified_base 2: mod_base = OTHER; note = 2'-O-methylguanosine-3'-phosphorothioate
  modified_base 7: mod_base = OTHER; note = 2'-fluorouridine-3'-phosphate
  modified_base 9: mod_base = OTHER; note = 2'-fluorocytidine-3'-phosphate
  modified_base 11: mod_base = OTHER; note = 2`-deoxyadenosine-3`-phosphate
  modified_base 12: mod_base = OTHER; note = 2'-fluorouridine-3'-phosphate
  modified_base 21: mod_base = OTHER; note = L96
  source 1..21: mol_type = other RNA
agagtattccatttttactat

SEQ ID NO: 1318 - RNA, 23 nt, synthetic construct
  modified_base 5: mod_base = OTHER; note = thymine
  misc_feature 1..23: note = Synthetic
  modified_base 1: mod_base = OTHER; note = 2'-O-methyladenosine-3'-phosphorothioate
  modified_base 2: mod_base = OTHER; note = 2'-fluorouridine -3'-phosphorothioate
  modified_base 5: mod_base = OTHER; note = 2`-deoxythimidine -3`-phosphate
  modified_base 7: mod_base = OTHER; note = Adenosine-glycol nucleic acid
  modified_base 14: mod_base = OTHER; note = 2`-deoxyadenosine-3`-phosphate
  modified_base 16: mod_base = OTHER; note = 2'-fluorouridine-3'-phosphate
  modified_base 21: mod_base = OTHER; note = 2'-O-methyluridine-3'- phosphorothioate
  modified_base 22: mod_base = OTHER; note = 2'-O-methyluridine-3'- phosphorothioate
  source 1..23: mol_type = other RNA
atagtaaaaatggaatactcttg

SEQ ID NO: 1319 - RNA, 23 nt, synthetic construct
  misc_feature 1..23: note = Synthetic
  source 1..23: mol_type = other RNA
caagagtattccatttttactaa

SEQ ID NO: 1320 - RNA, 21 nt, synthetic construct
  misc_feature 1..21: note = Synthetic
  modified_base 1: mod_base = OTHER; note = 2'-O-methyladenosine-3'- phosphorothioate
  modified_base 2: mod_base = OTHER; note = 2'-O-methylguanosine-3'-phosphorothioate
  modified_base 7: mod_base = OTHER; note = 2'-fluorouridine-3'-phosphate
  modified_base 9: mod_base = OTHER; note = 2'-fluorocytidine-3'-phosphate
  modified_base 10: mod_base = OTHER; note = 2'-fluorocytidine-3'-phosphate
  modified_base 11: mod_base = OTHER; note = 2`-deoxyadenosine-3`-phosphate
  modified_base 21: mod_base = OTHER; note = L96
  source 1..21: mol_type = other RNA
agagtattccatttttactat

SEQ ID NO: 1321 - RNA, 23 nt, synthetic construct
  modified_base 5: mod_base = OTHER; note = thymine
  misc_feature 1..23: note = Synthetic
  modified_base 1: mod_base = OTHER; note = 2'-O-methyladenosine-3'-phosphorothioate
  modified_base 2: mod_base = OTHER; note = 2'-fluorouridine -3'-phosphorothioate
  modified_base 5: mod_base = OTHER; note = 2`-deoxythimidine -3`-phosphate
  modified_base 7: mod_base = OTHER; note = Adenosine-glycol nucleic acid
  modified_base 14: mod_base = OTHER; note = 2'-fluoroadenosine-3'-phosphate
  modified_base 16: mod_base = OTHER; note = 2'-fluorouridine-3'-phosphate
  modified_base 21: mod_base = OTHER; note = 2'-O-methyluridine-3'- phosphorothioate
  modified_base 22: mod_base = OTHER; note = 2'-O-methylcytidine-3'- phosphorothioate
  source 1..23: mol_type = other RNA
atagtaaaaatggaatactctcc

SEQ ID NO: 1322 - RNA, 23 nt, synthetic construct
  misc_feature 1..23: note = Synthetic
  source 1..23: mol_type = other RNA
caagagtattccatttttactaa

SEQ ID NO: 1323 - RNA, 21 nt, synthetic construct
  misc_feature 1..21: note = Synthetic
  modified_base 1: mod_base = OTHER; note = 2'-O-methyladenosine-3'- phosphorothioate
  modified_base 2: mod_base = OTHER; note = 2'-O-methylguanosine-3'-phosphorothioate
  modified_base 7: mod_base = OTHER; note = 2'-fluorouridine-3'-phosphate
  modified_base 9: mod_base = OTHER; note = 2'-fluorocytidine-3'-phosphate
  modified_base 10: mod_base = OTHER; note = 2'-fluorocytidine-3'-phosphate
  modified_base 11: mod_base = OTHER; note = 2`-deoxyadenosine-3`-phosphate
  modified_base 21: mod_base = OTHER; note = L96
  source 1..21: mol_type = other RNA
agagtattccatttttactat

SEQ ID NO: 1324 - RNA, 23 nt, synthetic construct
  modified_base 5: mod_base = OTHER; note = thymine
  misc_feature 1..23: note = Synthetic
  modified_base 1: mod_base = OTHER; note = 2'-O-methyladenosine-3'-phosphorothioate
  modified_base 2: mod_base = OTHER; note = 2'-fluorouridine -3'-phosphorothioate
  modified_base 5: mod_base = OTHER; note = 2`-deoxythimidine -3`-phosphate
  modified_base 7: mod_base = OTHER; note = Adenosine-glycol nucleic acid
  modified_base 14: mod_base = OTHER; note = 2`-deoxyadenosine-3`-phosphate
  modified_base 16: mod_base = OTHER; note = 2'-fluorouridine-3'-phosphate
  modified_base 21: mod_base = OTHER; note = 2'-O-methyluridine-3'- phosphorothioate
  modified_base 22: mod_base = OTHER; note = 2'-O-methylcytidine-3'- phosphorothioate
  source 1..23: mol_type = other RNA
atagtaaaaatggaatactctcc

SEQ ID NO: 1325 - RNA, 23 nt, synthetic construct
  misc_feature 1..23: note = Synthetic
  source 1..23: mol_type = other RNA
caagagtattccatttttactaa

SEQ ID NO: 1326 - RNA, 21 nt, synthetic construct
  misc_feature 1..21: note = Synthetic
  modified_base 1: mod_base = OTHER; note = 2'-O-methyladenosine-3'- phosphorothioate
  modified_base 2: mod_base = OTHER; note = 2'-O-methylguanosine-3'-phosphorothioate
  modified_base 7: mod_base = OTHER; note = 2'-fluorouridine-3'-phosphate
  modified_base 9: mod_base = OTHER; note = 2'-fluorocytidine-3'-phosphate
  modified_base 10: mod_base = OTHER; note = 2'-fluorocytidine-3'-phosphate
  modified_base 11: mod_base = OTHER; note = 2`-deoxyadenosine-3`-phosphate
  modified_base 21: mod_base = OTHER; note = L96
  source 1..21: mol_type = other RNA
agagtattccatttttactat

SEQ ID NO: 1327 - RNA, 23 nt, synthetic construct
  modified_base 5: mod_base = OTHER; note = thymine
  misc_feature 1..23: note = Synthetic
  modified_base 1: mod_base = OTHER; note = 2'-O-methyladenosine-3'-phosphorothioate
  modified_base 2: mod_base = OTHER; note = 2'-fluorouridine -3'-phosphorothioate
  modified_base 5: mod_base = OTHER; note = 2`-deoxythimidine -3`-phosphate
  modified_base 7: mod_base = OTHER; note = Adenosine-glycol nucleic acid
  modified_base 14: mod_base = OTHER; note = 2'-fluoroadenosine-3'-phosphate
  modified_base 16: mod_base = OTHER; note = 2'-fluorouridine-3'-phosphate
  modified_base 21: mod_base = OTHER; note = 2'-O-methyluridine-3'- phosphorothioate
  modified_base 22: mod_base = OTHER; note = 2'-O-methylcytidine-3'- phosphorothioate
  source 1..23: mol_type = other RNA
atagtaaaaatggaatactctcc

SEQ ID NO: 1328 - RNA, 23 nt, synthetic construct
  misc_feature 1..23: note = Synthetic
  source 1..23: mol_type = other RNA
caagagtattccatttttactaa

SEQ ID NO: 1329 - RNA, 21 nt, synthetic construct
  misc_feature 1..21: note = Synthetic
  modified_base 1: mod_base = OTHER; note = 2'-O-methyladenosine-3'- phosphorothioate
  modified_base 2: mod_base = OTHER; note = 2'-O-methylguanosine-3'-phosphorothioate
  modified_base 7: mod_base = OTHER; note = 2'-fluorouridine-3'-phosphate
  modified_base 9: mod_base = OTHER; note = 2'-fluorocytidine-3'-phosphate
  modified_base 10: mod_base = OTHER; note = 2'-fluorocytidine-3'-phosphate
  modified_base 11: mod_base = OTHER; note = 2`-deoxyadenosine-3`-phosphate
  modified_base 21: mod_base = OTHER; note = L96
  source 1..21: mol_type = other RNA
agagtattccatttttactat

SEQ ID NO: 1330 - RNA, 23 nt, synthetic construct
  modified_base 5: mod_base = OTHER; note = thymine
  misc_feature 1..23: note = Synthetic
  modified_base 1: mod_base = OTHER; note = 2'-O-methyladenosine-3'-phosphorothioate
  modified_base 2: mod_base = OTHER; note = 2'-fluorouridine -3'-phosphorothioate
  modified_base 5: mod_base = OTHER; note = 2`-deoxythimidine -3`-phosphate
  modified_base 7: mod_base = OTHER; note = Adenosine-glycol nucleic acid
  modified_base 14: mod_base = OTHER; note = 2`-deoxyadenosine-3`-phosphate
  modified_base 16: mod_base = OTHER; note = 2'-fluorouridine-3'-phosphate
  modified_base 21: mod_base = OTHER; note = 2'-O-methyluridine-3'- phosphorothioate
  modified_base 22: mod_base = OTHER; note = 2'-O-methylcytidine-3'- phosphorothioate
  source 1..23: mol_type = other RNA
atagtaaaaatggaatactctcc

SEQ ID NO: 1331 - RNA, 23 nt, synthetic construct
  misc_feature 1..23: note = Synthetic
  source 1..23: mol_type = other RNA
caagagtattccatttttactaa

SEQ ID NO: 1332 - RNA, 19 nt, synthetic construct
  misc_feature 1..19: note = Synthetic
  modified_base 1: mod_base = OTHER; note = 2'-O-methyladenosine-3'- phosphorothioate
  modified_base 2: mod_base = OTHER; note = 2'-O-methylguanosine-3'-phosphorothioate
  modified_base 5: mod_base = OTHER; note = 2'-fluorouridine-3'-phosphate
  modified_base 7: mod_base = OTHER; note = 2'-fluorocytidine-3'-phosphate
  modified_base 8: mod_base = OTHER; note = 2'-fluorocytidine-3'-phosphate
  modified_base 9: mod_base = OTHER; note = 2`-deoxyadenosine-3`-phosphate
  modified_base 19: mod_base = OTHER; note = L96
  source 1..19: mol_type = other RNA
agtattccatttttactat

SEQ ID NO: 1333 - RNA, 21 nt, synthetic construct
  modified_base 5: mod_base = OTHER; note = thymine
  misc_feature 1..21: note = Synthetic
  modified_base 1: mod_base = OTHER; note = 2'-O-methyladenosine-3'-phosphorothioate
  modified_base 2: mod_base = OTHER; note = 2'-fluorouridine -3'-phosphorothioate
  modified_base 5: mod_base = OTHER; note = 2`-deoxythimidine -3`-phosphate
  modified_base 7: mod_base = OTHER; note = Adenosine-glycol nucleic acid
  modified_base 14: mod_base = OTHER; note = 2'-fluoroadenosine-3'-phosphate
  modified_base 16: mod_base = OTHER; note = 2'-fluorouridine-3'-phosphate
  modified_base 19: mod_base = OTHER; note = 2'-O-methyluridine-3'- phosphorothioate
  modified_base 20: mod_base = OTHER; note = 2'-O-methylcytidine-3'- phosphorothioate
  source 1..21: mol_type = other RNA
atagtaaaaatggaatactct

SEQ ID NO: 1334 - RNA, 21 nt, synthetic construct
  misc_feature 1..21: note = Synthetic
  source 1..21: mol_type = other RNA
agagtattccatttttactaa

SEQ ID NO: 1335 - RNA, 19 nt, synthetic construct
  misc_feature 1..19: note = Synthetic
  modified_base 1: mod_base = OTHER; note = 2'-O-methyladenosine-3'- phosphorothioate
  modified_base 2: mod_base = OTHER; note = 2'-O-methylguanosine-3'-phosphorothioate
  modified_base 5: mod_base = OTHER; note = 2'-fluorouridine-3'-phosphate
  modified_base 7: mod_base = OTHER; note = 2'-fluorocytidine-3'-phosphate
  modified_base 8: mod_base = OTHER; note = 2'-fluorocytidine-3'-phosphate
  modified_base 9: mod_base = OTHER; note = 2`-deoxyadenosine-3`-phosphate
  modified_base 19: mod_base = OTHER; note = L96
  source 1..19: mol_type = other RNA
agtattccatttttactat

SEQ ID NO: 1336 - RNA, 21 nt, synthetic construct
  modified_base 5: mod_base = OTHER; note = thymine
  misc_feature 1..21: note = Synthetic
  modified_base 1: mod_base = OTHER; note = 2'-O-methyladenosine-3'-phosphorothioate
  modified_base 2: mod_base = OTHER; note = 2'-fluorouridine -3'-phosphorothioate
  modified_base 5: mod_base = OTHER; note = 2`-deoxythimidine -3`-phosphate
  modified_base 7: mod_base = OTHER; note = Adenosine-glycol nucleic acid
  modified_base 14: mod_base = OTHER; note = 2`-deoxyadenosine-3`-phosphate
  modified_base 16: mod_base = OTHER; note = 2'-fluorouridine-3'-phosphate
  modified_base 19: mod_base = OTHER; note = 2'-O-methyluridine-3'- phosphorothioate
  modified_base 20: mod_base = OTHER; note = 2'-O-methylcytidine-3'- phosphorothioate
  source 1..21: mol_type = other RNA
atagtaaaaatggaatactct

SEQ ID NO: 1337 - RNA, 21 nt, synthetic construct
  misc_feature 1..21: note = Synthetic
  source 1..21: mol_type = other RNA
agagtattccatttttactaa

SEQ ID NO: 1338 - RNA, 19 nt, synthetic construct
  misc_feature 1..19: note = Synthetic
  modified_base 1: mod_base = OTHER; note = 2'-O-methyladenosine-3'- phosphorothioate
  modified_base 2: mod_base = OTHER; note = 2'-O-methylguanosine-3'-phosphorothioate
  modified_base 5: mod_base = OTHER; note = 2'-fluorouridine-3'-phosphate
  modified_base 7: mod_base = OTHER; note = 2'-fluorocytidine-3'-phosphate
  modified_base 8: mod_base = OTHER; note = 2'-fluorocytidine-3'-phosphate
  modified_base 9: mod_base = OTHER; note = 2`-deoxyadenosine-3`-phosphate
  modified_base 19: mod_base = OTHER; note = L96
  source 1..19: mol_type = other RNA
agtattccatttttactat

SEQ ID NO: 1339 - RNA, 21 nt, synthetic construct
  modified_base 5: mod_base = OTHER; note = thymine
  misc_feature 1..21: note = Synthetic
  modified_base 1: mod_base = OTHER; note = 2'-O-methyladenosine-3'-phosphorothioate
  modified_base 2: mod_base = OTHER; note = 2'-fluorouridine -3'-phosphorothioate
  modified_base 5: mod_base = OTHER; note = 2`-deoxythimidine -3`-phosphate
  modified_base 7: mod_base = OTHER; note = adenosine-2`-phosphate
  modified_base 14: mod_base = OTHER; note = 2'-fluoroadenosine-3'-phosphate
  modified_base 16: mod_base = OTHER; note = 2'-fluorouridine-3'-phosphate
  modified_base 19: mod_base = OTHER; note = 2'-O-methyluridine-3'- phosphorothioate
  modified_base 20: mod_base = OTHER; note = 2'-O-methylcytidine-3'- phosphorothioate
  source 1..21: mol_type = other RNA
atagtaaaaatggaatactct

SEQ ID NO: 1340 - RNA, 21 nt, synthetic construct
  misc_feature 1..21: note = Synthetic
  source 1..21: mol_type = other RNA
agagtattccatttttactaa

SEQ ID NO: 1341 - RNA, 19 nt, synthetic construct
  misc_feature 1..19: note = Synthetic
  modified_base 1: mod_base = OTHER; note = 2'-O-methyladenosine-3'- phosphorothioate
  modified_base 2: mod_base = OTHER; note = 2'-O-methylguanosine-3'-phosphorothioate
  modified_base 5: mod_base = OTHER; note = 2'-fluorouridine-3'-phosphate
  modified_base 7: mod_base = OTHER; note = 2'-fluorocytidine-3'-phosphate
  modified_base 8: mod_base = OTHER; note = 2'-fluorocytidine-3'-phosphate
  modified_base 9: mod_base = OTHER; note = 2`-deoxyadenosine-3`-phosphate
  modified_base 19: mod_base = OTHER; note = L96
  source 1..19: mol_type = other RNA
agtattccatttttactat

SEQ ID NO: 1342 - RNA, 21 nt, synthetic construct
  modified_base 5: mod_base = OTHER; note = thymine
  misc_feature 1..21: note = Synthetic
  modified_base 1: mod_base = OTHER; note = 2'-O-methyladenosine-3'-phosphorothioate
  modified_base 2: mod_base = OTHER; note = 2'-fluorouridine -3'-phosphorothioate
  modified_base 5: mod_base = OTHER; note = 2`-deoxythimidine -3`-phosphate
  modified_base 7: mod_base = OTHER; note = adenosine-2`-phosphate
  modified_base 14: mod_base = OTHER; note = 2`-deoxyadenosine-3`-phosphate
  modified_base 16: mod_base = OTHER; note = 2'-fluorouridine-3'-phosphate
  modified_base 19: mod_base = OTHER; note = 2'-O-methyluridine-3'- phosphorothioate
  modified_base 20: mod_base = OTHER; note = 2'-O-methylcytidine-3'- phosphorothioate
  source 1..21: mol_type = other RNA
atagtaaaaatggaatactct

SEQ ID NO: 1343 - RNA, 21 nt, synthetic construct
  misc_feature 1..21: note = Synthetic
  source 1..21: mol_type = other RNA
agagtattccatttttactaa

SEQ ID NO: 1344 - RNA, 21 nt, synthetic construct
  misc_feature 1..21: note = Synthetic
  modified_base 1: mod_base = OTHER; note = 2'-O-methylcytidine-3'- phosphorothioate
  modified_base 2: mod_base = OTHER; note = 2'-O-methyluridine-3'-phosphorothioate
  modified_base 7: mod_base = OTHER; note = 2'-fluorocytidine-3'-phosphate
  modified_base 9: mod_base = OTHER; note = 2'-fluoroguanosine-3'-phosphate
  modified_base 10: mod_base = OTHER; note = 2'-fluorouridine-3'-phosphate
  modified_base 11: mod_base = OTHER; note = 2'-fluoroguanosine-3'-phosphate
  modified_base 21: mod_base = OTHER; note = L96
  source 1..21: mol_type = other RNA
ctaaagcagtgttttcaccta

SEQ ID NO: 1345 - RNA, 23 nt, synthetic construct
  modified_base 5: mod_base = OTHER; note = thymine
  misc_feature 1..23: note = Synthetic
  modified_base 1: mod_base = OTHER; note = 2'-O-methyluridine-3'- phosphorothioate
  modified_base 2: mod_base = OTHER; note = 2'-fluoroadenosine-3'-phosphorothioate
  modified_base 5: mod_base = OTHER; note = 2`-deoxythimidine -3`-phosphate
  modified_base 7: mod_base = OTHER; note = adenosine-2`-phosphate
  modified_base 14: mod_base = OTHER; note = 2'-fluorouridine-3'-phosphate
  modified_base 16: mod_base = OTHER; note = 2'-fluorocytidine-3'-phosphate
  modified_base 21: mod_base = OTHER; note = 2'-O-methylguanosine-3'- phosphorothioate
  modified_base 22: mod_base = OTHER; note = 2'-O-methyluridine-3'- phosphorothioate
  source 1..23: mol_type = other RNA
taggtgaaaacactgctttagta

SEQ ID NO: 1346 - RNA, 23 nt, synthetic construct
  misc_feature 1..23: note = Synthetic
  source 1..23: mol_type = other RNA
tactaaagcagtgttttcacctc

SEQ ID NO: 1347 - RNA, 21 nt, synthetic construct
  misc_feature 1..21: note = Synthetic
  modified_base 1: mod_base = OTHER; note = 2'-O-methylcytidine-3'- phosphorothioate
  modified_base 2: mod_base = OTHER; note = 2'-O-methyluridine-3'-phosphorothioate
  modified_base 7: mod_base = OTHER; note = 2'-fluorocytidine-3'-phosphate
  modified_base 10: mod_base = OTHER; note = 2'-fluorouridine-3'-phosphate
  modified_base 11: mod_base = OTHER; note = 2`-deoxyguanosine-3`-phosphate
  modified_base 21: mod_base = OTHER; note = L96
  source 1..21: mol_type = other RNA
ctaaagcagtgttttcaccta

SEQ ID NO: 1348 - RNA, 23 nt, synthetic construct
  modified_base 5: mod_base = OTHER; note = thymine
  misc_feature 1..23: note = Synthetic
  modified_base 1: mod_base = OTHER; note = 2'-O-methyluridine-3'- phosphorothioate
  modified_base 2: mod_base = OTHER; note = 2'-fluoroadenosine-3'-phosphorothioate
  modified_base 5: mod_base = OTHER; note = 2`-deoxythimidine -3`-phosphate
  modified_base 7: mod_base = OTHER; note = adenosine-2`-phosphate
  modified_base 14: mod_base = OTHER; note = 2'-fluorouridine-3'-phosphate
  modified_base 16: mod_base = OTHER; note = 2'-fluorocytidine-3'-phosphate
  modified_base 21: mod_base = OTHER; note = 2'-O-methylguanosine-3'- phosphorothioate
  modified_base 22: mod_base = OTHER; note = 2'-O-methyluridine-3'- phosphorothioate
  source 1..23: mol_type = other RNA
taggtgaaaacactgctttagta

SEQ ID NO: 1349 - RNA, 23 nt, synthetic construct
  misc_feature 1..23: note = Synthetic
  source 1..23: mol_type = other RNA
tactaaagcagtgttttcacctc

SEQ ID NO: 1350 - RNA, 21 nt, synthetic construct
  misc_feature 1..21: note = Synthetic
  modified_base 1: mod_base = OTHER; note = 2'-O-methylcytidine-3'- phosphorothioate
  modified_base 2: mod_base = OTHER; note = 2'-O-methyluridine-3'-phosphorothioate
  modified_base 7: mod_base = OTHER; note = 2'-fluorocytidine-3'-phosphate
  modified_base 9: mod_base = OTHER; note = 2`-deoxyguanosine-3`-phosphate
  modified_base 11: mod_base = OTHER; note = 2`-deoxyguanosine-3`-phosphate
  modified_base 12: mod_base = OTHER; note = 2'-fluorouridine-3'-phosphate
  modified_base 21: mod_base = OTHER; note = L96
  source 1..21: mol_type = other RNA
ctaaagcagtgttttcaccta

SEQ ID NO: 1351 - RNA, 23 nt, synthetic construct
  modified_base 5: mod_base = OTHER; note = thymine
  misc_feature 1..23: note = Synthetic
  modified_base 1: mod_base = OTHER; note = 2'-O-methyluridine-3'- phosphorothioate
  modified_base 2: mod_base = OTHER; note = 2'-fluoroadenosine-3'-phosphorothioate
  modified_base 5: mod_base = OTHER; note = 2`-deoxythimidine -3`-phosphate
  modified_base 7: mod_base = OTHER; note = adenosine-2`-phosphate
  modified_base 14: mod_base = OTHER; note = 2'-fluorouridine-3'-phosphate
  modified_base 16: mod_base = OTHER; note = 2'-fluorocytidine-3'-phosphate
  modified_base 21: mod_base = OTHER; note = 2'-O-methylguanosine-3'- phosphorothioate
  modified_base 22: mod_base = OTHER; note = 2'-O-methyluridine-3'- phosphorothioate
  source 1..23: mol_type = other RNA
taggtgaaaacactgctttagta

SEQ ID NO: 1352 - RNA, 23 nt, synthetic construct
  misc_feature 1..23: note = Synthetic
  source 1..23: mol_type = other RNA
tactaaagcagtgttttcacctc

SEQ ID NO: 1353 - RNA, 21 nt, synthetic construct
  misc_feature 1..21: note = Synthetic
  modified_base 1: mod_base = OTHER; note = 2'-O-methylcytidine-3'- phosphorothioate
  modified_base 2: mod_base = OTHER; note = 2'-O-methyluridine-3'-phosphorothioate
  modified_base 7: mod_base = OTHER; note = 2'-fluorocytidine-3'-phosphate
  modified_base 9: mod_base = OTHER; note = 2'-fluoroguanosine-3'-phosphate
  modified_base 10: mod_base = OTHER; note = 2'-fluorouridine-3'-phosphate
  modified_base 11: mod_base = OTHER; note = 2'-fluoroguanosine-3'-phosphate
  modified_base 21: mod_base = OTHER; note = L96
  source 1..21: mol_type = other RNA
ctaaagcagtgttttcacctt

SEQ ID NO: 1354 - RNA, 23 nt, synthetic construct
  modified_base 5: mod_base = OTHER; note = thymine
  misc_feature 1..23: note = Synthetic
  modified_base 1: mod_base = OTHER; note = 2'-O-methyladenosine-3'- phosphorothioate
  modified_base 2: mod_base = OTHER; note = 2'-fluoroadenosine-3'-phosphorothioate
  modified_base 5: mod_base = OTHER; note = 2`-deoxythimidine -3`-phosphate
  modified_base 7: mod_base = OTHER; note = adenosine-2`-phosphate
  modified_base 14: mod_base = OTHER; note = 2'-fluorouridine-3'-phosphate
  modified_base 16: mod_base = OTHER; note = 2'-fluorocytidine-3'-phosphate
  modified_base 21: mod_base = OTHER; note = 2'-O-methylguanosine-3'- phosphorothioate
  modified_base 22: mod_base = OTHER; note = 2'-O-methyluridine-3'- phosphorothioate
  source 1..23: mol_type = other RNA
aaggtgaaaacactgctttagta

SEQ ID NO: 1355 - RNA, 23 nt, synthetic construct
  misc_feature 1..23: note = Synthetic
  source 1..23: mol_type = other RNA
tactaaagcagtgttttcacctc

SEQ ID NO: 1356 - RNA, 21 nt, synthetic construct
  misc_feature 1..21: note = Synthetic
  modified_base 1: mod_base = OTHER; note = 2'-O-methylcytidine-3'- phosphorothioate
  modified_base 2: mod_base = OTHER; note = 2'-O-methyluridine-3'-phosphorothioate
  modified_base 7: mod_base = OTHER; note = 2'-fluorocytidine-3'-phosphate
  modified_base 9: mod_base = OTHER; note = 2'-fluoroguanosine-3'-phosphate
  modified_base 10: mod_base = OTHER; note = 2'-fluorouridine-3'-phosphate
  modified_base 11: mod_base = OTHER; note = 2'-fluoroguanosine-3'-phosphate
  modified_base 21: mod_base = OTHER; note = L96
  source 1..21: mol_type = other RNA
ctaaagcagtgttttcaccta

SEQ ID NO: 1357 - RNA, 23 nt, synthetic construct
  modified_base 5: mod_base = OTHER; note = thymine
  misc_feature 1..23: note = Synthetic
  modified_base 1: mod_base = OTHER; note = 2'-O-methyluridine-3'- phosphorothioate
  modified_base 2: mod_base = OTHER; note = 2`-deoxyadenosine-3`-phosphate
  modified_base 5: mod_base = OTHER; note = 2`-deoxythimidine -3`-phosphate
  modified_base 7: mod_base = OTHER; note = adenosine-2`-phosphate
  modified_base 14: mod_base = OTHER; note = 2'-fluorouridine-3'-phosphate
  modified_base 16: mod_base = OTHER; note = 2'-fluorocytidine-3'-phosphate
  modified_base 21: mod_base = OTHER; note = 2'-O-methylguanosine-3'- phosphorothioate
  modified_base 22: mod_base = OTHER; note = 2'-O-methyluridine-3'- phosphorothioate
  source 1..23: mol_type = other RNA
taggtgaaaacactgctttagta

SEQ ID NO: 1358 - RNA, 23 nt, synthetic construct
  misc_feature 1..23: note = Synthetic
  source 1..23: mol_type = other RNA
tactaaagcagtgttttcacctc

SEQ ID NO: 1359 - RNA, 21 nt, synthetic construct
  misc_feature 1..21: note = Synthetic
  modified_base 1: mod_base = OTHER; note = 2'-O-methylcytidine-3'- phosphorothioate
  modified_base 2: mod_base = OTHER; note = 2'-O-methyluridine-3'-phosphorothioate
  modified_base 7: mod_base = OTHER; note = 2'-fluorocytidine-3'-phosphate
  modified_base 9: mod_base = OTHER; note = 2'-fluoroguanosine-3'-phosphate
  modified_base 10: mod_base = OTHER; note = 2'-fluorouridine-3'-phosphate
  modified_base 11: mod_base = OTHER; note = 2'-fluoroguanosine-3'-phosphate
  modified_base 21: mod_base = OTHER; note = L96
  source 1..21: mol_type = other RNA
ctaaagcagtgttttcaccta

SEQ ID NO: 1360 - RNA, 23 nt, synthetic construct
  modified_base 5: mod_base = OTHER; note = thymine
  misc_feature 1..23: note = Synthetic
  modified_base 1: mod_base = OTHER; note = 2'-O-methyluridine-3'- phosphorothioate
  modified_base 2: mod_base = OTHER; note = 2'-fluoroadenosine-3'-phosphorothioate
  modified_base 5: mod_base = OTHER; note = 2`-deoxythimidine -3`-phosphate
  modified_base 7: mod_base = OTHER; note = adenosine-2`-phosphate
  modified_base 14: mod_base = OTHER; note = 2'-fluorouridine-3'-phosphate
  modified_base 16: mod_base = OTHER; note = 2'-fluorocytidine-3'-phosphate
  modified_base 21: mod_base = OTHER; note = 2'-O-methylguanosine-3'- phosphorothioate
  modified_base 22: mod_base = OTHER; note = 2'-O-methylcytidine-3'- phosphorothioate
  source 1..23: mol_type = other RNA
taggtgaaaacactgctttagcc

SEQ ID NO: 1361 - RNA, 23 nt, synthetic construct
  misc_feature 1..23: note = Synthetic
  source 1..23: mol_type = other RNA
tactaaagcagtgttttcacctc

SEQ ID NO: 1362 - RNA, 19 nt, synthetic construct
  misc_feature 1..19: note = Synthetic
  modified_base 1: mod_base = OTHER; note = 2'-O-methyladenosine-3'- phosphorothioate
  modified_base 2: mod_base = OTHER; note = 2'-O-methyladenosine-3'-phosphorothioate
  modified_base 5: mod_base = OTHER; note = 2'-fluorocytidine-3'-phosphate
  modified_base 7: mod_base = OTHER; note = 2'-fluoroguanosine-3'-phosphate
  modified_base 8: mod_base = OTHER; note = 2'-fluorouridine-3'-phosphate
  modified_base 9: mod_base = OTHER; note = 2'-fluoroguanosine-3'-phosphate
  modified_base 19: mod_base = OTHER; note = L96
  source 1..19: mol_type = other RNA
aaagcagtgttttcaccta

SEQ ID NO: 1363 - RNA, 21 nt, synthetic construct
  modified_base 5: mod_base = OTHER; note = thymine
  misc_feature 1..21: note = Synthetic
  modified_base 1: mod_base = OTHER; note = 2'-O-methyluridine-3'- phosphorothioate
  modified_base 2: mod_base = OTHER; note = 2'-fluoroadenosine-3'-phosphorothioate
  modified_base 5: mod_base = OTHER; note = 2`-deoxythimidine -3`-phosphate
  modified_base 7: mod_base = OTHER; note = adenosine-2`-phosphate
  modified_base 14: mod_base = OTHER; note = 2'-fluorouridine-3'-phosphate
  modified_base 16: mod_base = OTHER; note = 2'-fluorocytidine-3'-phosphate
  modified_base 19: mod_base = OTHER; note = 2'-O-methyluridine-3'- phosphorothioate
  modified_base 20: mod_base = OTHER; note = 2'-O-methyladenosine-3'- phosphorothioate
  source 1..21: mol_type = other RNA
taggtgaaaacactgctttag

SEQ ID NO: 1364 - RNA, 21 nt, synthetic construct
  misc_feature 1..21: note = Synthetic
  source 1..21: mol_type = other RNA
ctaaagcagtgttttcacctc

SEQ ID NO: 1365 - RNA, 21 nt, synthetic construct
  misc_feature 1..21: note = Synthetic
  modified_base 1: mod_base = OTHER; note = 2'-O-methylcytidine-3'- phosphorothioate
  modified_base 2: mod_base = OTHER; note = 2'-O-methyluridine-3'-phosphorothioate
  modified_base 7: mod_base = OTHER; note = 2'-fluorocytidine-3'-phosphate
  modified_base 10: mod_base = OTHER; note = 2'-fluorouridine-3'-phosphate
  modified_base 11: mod_base = OTHER; note = 2`-deoxyguanosine-3`-phosphate
  modified_base 21: mod_base = OTHER; note = L96
  source 1..21: mol_type = other RNA
ctaaagcagtgttttcaccta

SEQ ID NO: 1366 - RNA, 23 nt, synthetic construct
  modified_base 5: mod_base = OTHER; note = thymine
  misc_feature 1..23: note = Synthetic
  modified_base 1: mod_base = OTHER; note = 2'-O-methyladenosine-3'- phosphorothioate
  modified_base 2: mod_base = OTHER; note = 2`-deoxyadenosine-3`-phosphate
  modified_base 5: mod_base = OTHER; note = 2`-deoxythimidine -3`-phosphate
  modified_base 7: mod_base = OTHER; note = adenosine-2`-phosphate
  modified_base 14: mod_base = OTHER; note = 2'-fluorouridine-3'-phosphate
  modified_base 16: mod_base = OTHER; note = 2'-fluorocytidine-3'-phosphate
  modified_base 21: mod_base = OTHER; note = 2'-O-methylguanosine-3'- phosphorothioate
  modified_base 22: mod_base = OTHER; note = 2'-O-methyluridine-3'- phosphorothioate
  source 1..23: mol_type = other RNA
aaggtgaaaacactgctttagta

SEQ ID NO: 1367 - RNA, 23 nt, synthetic construct
  misc_feature 1..23: note = Synthetic
  source 1..23: mol_type = other RNA
tactaaagcagtgttttcacctc

SEQ ID NO: 1368 - RNA, 21 nt, synthetic construct
  misc_feature 1..21: note = Synthetic
  modified_base 1: mod_base = OTHER; note = 2'-O-methylcytidine-3'- phosphorothioate
  modified_base 2: mod_base = OTHER; note = 2'-O-methyluridine-3'-phosphorothioate
  modified_base 7: mod_base = OTHER; note = 2'-fluorocytidine-3'-phosphate
  modified_base 9: mod_base = OTHER; note = 2`-deoxyguanosine-3`-phosphate
  modified_base 11: mod_base = OTHER; note = 2`-deoxyguanosine-3`-phosphate
  modified_base 12: mod_base = OTHER; note = 2'-fluorouridine-3'-phosphate
  modified_base 21: mod_base = OTHER; note = L96
  source 1..21: mol_type = other RNA
ctaaagcagtgttttcaccta

SEQ ID NO: 1369 - RNA, 23 nt, synthetic construct
  modified_base 5: mod_base = OTHER; note = thymine
  misc_feature 1..23: note = Synthetic
  modified_base 1: mod_base = OTHER; note = 2'-O-methyladenosine-3'- phosphorothioate
  modified_base 2: mod_base = OTHER; note = 2`-deoxyadenosine-3`-phosphate
  modified_base 5: mod_base = OTHER; note = 2`-deoxythimidine -3`-phosphate
  modified_base 7: mod_base = OTHER; note = adenosine-2`-phosphate
  modified_base 14: mod_base = OTHER; note = 2'-fluorouridine-3'-phosphate
  modified_base 16: mod_base = OTHER; note = 2'-fluorocytidine-3'-phosphate
  modified_base 21: mod_base = OTHER; note = 2'-O-methylguanosine-3'- phosphorothioate
  modified_base 22: mod_base = OTHER; note = 2'-O-methyluridine-3'- phosphorothioate
  source 1..23: mol_type = other RNA
aaggtgaaaacactgctttagta

SEQ ID NO: 1370 - RNA, 23 nt, synthetic construct
  misc_feature 1..23: note = Synthetic
  source 1..23: mol_type = other RNA
tactaaagcagtgttttcacctc

SEQ ID NO: 1371 - RNA, 21 nt, synthetic construct
  misc_feature 1..21: note = Synthetic
  modified_base 1: mod_base = OTHER; note = 2'-O-methylcytidine-3'- phosphorothioate
  modified_base 2: mod_base = OTHER; note = 2'-O-methyluridine-3'-phosphorothioate
  modified_base 7: mod_base = OTHER; note = 2'-fluorocytidine-3'-phosphate
  modified_base 10: mod_base = OTHER; note = 2'-fluorouridine-3'-phosphate
  modified_base 11: mod_base = OTHER; note = 2`-deoxyguanosine-3`-phosphate
  modified_base 21: mod_base = OTHER; note = L96
  source 1..21: mol_type = other RNA
ctaaagcagtgttttcaccta

SEQ ID NO: 1372 - RNA, 23 nt, synthetic construct
  modified_base 5: mod_base = OTHER; note = thymine
  misc_feature 1..23: note = Synthetic
  modified_base 1: mod_base = OTHER; note = 2'-O-methyladenosine-3'- phosphorothioate
  modified_base 2: mod_base = OTHER; note = 2`-deoxyadenosine-3`-phosphate
  modified_base 5: mod_base = OTHER; note = 2`-deoxythimidine -3`-phosphate
  modified_base 7: mod_base = OTHER; note = adenosine-2`-phosphate
  modified_base 14: mod_base = OTHER; note = 2'-fluorouridine-3'-phosphate
  modified_base 16: mod_base = OTHER; note = 2'-fluorocytidine-3'-phosphate
  modified_base 21: mod_base = OTHER; note = 2'-O-methylguanosine-3'- phosphorothioate
  modified_base 22: mod_base = OTHER; note = 2'-O-methylcytidine-3'- phosphorothioate
  source 1..23: mol_type = other RNA
aaggtgaaaacactgctttagcc

SEQ ID NO: 1373 - RNA, 23 nt, synthetic construct
  misc_feature 1..23: note = Synthetic
  source 1..23: mol_type = other RNA
tactaaagcagtgttttcacctc

SEQ ID NO: 1374 - RNA, 21 nt, synthetic construct
  misc_feature 1..21: note = Synthetic
  modified_base 1: mod_base = OTHER; note = 2'-O-methylcytidine-3'- phosphorothioate
  modified_base 2: mod_base = OTHER; note = 2'-O-methyluridine-3'-phosphorothioate
  modified_base 7: mod_base = OTHER; note = 2'-fluorocytidine-3'-phosphate
  modified_base 9: mod_base = OTHER; note = 2`-deoxyguanosine-3`-phosphate
  modified_base 11: mod_base = OTHER; note = 2`-deoxyguanosine-3`-phosphate
  modified_base 12: mod_base = OTHER; note = 2'-fluorouridine-3'-phosphate
  modified_base 21: mod_base = OTHER; note = L96
  source 1..21: mol_type = other RNA
ctaaagcagtgttttcaccta

SEQ ID NO: 1375 - RNA, 23 nt, synthetic construct
  modified_base 5: mod_base = OTHER; note = thymine
  misc_feature 1..23: note = Synthetic
  modified_base 1: mod_base = OTHER; note = 2'-O-methyladenosine-3'- phosphorothioate
  modified_base 2: mod_base = OTHER; note = 2`-deoxyadenosine-3`-phosphate
  modified_base 5: mod_base = OTHER; note = 2`-deoxythimidine -3`-phosphate
  modified_base 7: mod_base = OTHER; note = adenosine-2`-phosphate
  modified_base 14: mod_base = OTHER; note = 2'-fluorouridine-3'-phosphate
  modified_base 16: mod_base = OTHER; note = 2'-fluorocytidine-3'-phosphate
  modified_base 21: mod_base = OTHER; note = 2'-O-methylguanosine-3'- phosphorothioate
  modified_base 22: mod_base = OTHER; note = 2'-O-methylcytidine-3'- phosphorothioate
  source 1..23: mol_type = other RNA
aaggtgaaaacactgctttagcc

SEQ ID NO: 1376 - RNA, 23 nt, synthetic construct
  misc_feature 1..23: note = Synthetic
  source 1..23: mol_type = other RNA
tactaaagcagtgttttcacctc

SEQ ID NO: 1377 - RNA, 19 nt, synthetic construct
  misc_feature 1..19: note = Synthetic
  modified_base 1: mod_base = OTHER; note = 2'-O-methyladenosine-3'- phosphorothioate
  modified_base 2: mod_base = OTHER; note = 2'-O-methyladenosine-3'-phosphorothioate
  modified_base 5: mod_base = OTHER; note = 2'-fluorocytidine-3'-phosphate
  modified_base 8: mod_base = OTHER; note = 2'-fluorouridine-3'-phosphate
  modified_base 9: mod_base = OTHER; note = 2`-deoxyguanosine-3`-phosphate
  modified_base 19: mod_base = OTHER; note = L96
  source 1..19: mol_type = other RNA
aaagcagtgttttcaccta

SEQ ID NO: 1378 - RNA, 21 nt, synthetic construct
  modified_base 5: mod_base = OTHER; note = thymine
  misc_feature 1..21: note = Synthetic
  modified_base 1: mod_base = OTHER; note = 2'-O-methyladenosine-3'- phosphorothioate
  modified_base 2: mod_base = OTHER; note = 2`-deoxyadenosine-3`-phosphate
  modified_base 5: mod_base = OTHER; note = 2`-deoxythimidine -3`-phosphate
  modified_base 7: mod_base = OTHER; note = adenosine-2`-phosphate
  modified_base 14: mod_base = OTHER; note = 2'-fluorouridine-3'-phosphate
  modified_base 16: mod_base = OTHER; note = 2'-fluorocytidine-3'-phosphate
  modified_base 19: mod_base = OTHER; note = 2'-O-methyluridine-3'- phosphorothioate
  modified_base 20: mod_base = OTHER; note = 2'-O-methyladenosine-3'- phosphorothioate
  source 1..21: mol_type = other RNA
aaggtgaaaacactgctttag

SEQ ID NO: 1379 - RNA, 21 nt, synthetic construct
  misc_feature 1..21: note = Synthetic
  source 1..21: mol_type = other RNA
ctaaagcagtgttttcacctc

SEQ ID NO: 1380 - RNA, 19 nt, synthetic construct
  misc_feature 1..19: note = Synthetic
  modified_base 1: mod_base = OTHER; note = 2'-O-methyladenosine-3'- phosphorothioate
  modified_base 2: mod_base = OTHER; note = 2'-O-methyladenosine-3'-phosphorothioate
  modified_base 5: mod_base = OTHER; note = 2'-fluorocytidine-3'-phosphate
  modified_base 7: mod_base = OTHER; note = 2`-deoxyguanosine-3`-phosphate
  modified_base 9: mod_base = OTHER; note = 2`-deoxyguanosine-3`-phosphate
  modified_base 10: mod_base = OTHER; note = 2'-fluorouridine-3'-phosphate
  modified_base 19: mod_base = OTHER; note = L96
  source 1..19: mol_type = other RNA
aaagcagtgttttcaccta

SEQ ID NO: 1381 - RNA, 21 nt, synthetic construct
  modified_base 5: mod_base = OTHER; note = thymine
  misc_feature 1..21: note = Synthetic
  modified_base 1: mod_base = OTHER; note = 2'-O-methyladenosine-3'- phosphorothioate
  modified_base 2: mod_base = OTHER; note = 2`-deoxyadenosine-3`-phosphate
  modified_base 5: mod_base = OTHER; note = 2`-deoxythimidine -3`-phosphate
  modified_base 7: mod_base = OTHER; note = adenosine-2`-phosphate
  modified_base 14: mod_base = OTHER; note = 2'-fluorouridine-3'-phosphate
  modified_base 16: mod_base = OTHER; note = 2'-fluorocytidine-3'-phosphate
  modified_base 19: mod_base = OTHER; note = 2'-O-methyluridine-3'- phosphorothioate
  modified_base 20: mod_base = OTHER; note = 2'-O-methyladenosine-3'- phosphorothioate
  source 1..21: mol_type = other RNA
aaggtgaaaacactgctttag

SEQ ID NO: 1382 - RNA, 21 nt, synthetic construct
  misc_feature 1..21: note = Synthetic
  source 1..21: mol_type = other RNA
ctaaagcagtgttttcacctc

We claim:

1. A double stranded ribonucleic acid (dsRNA) agent, or salt thereof, for inhibiting expression of transthyretin (TTR) in a cell,
wherein the dsRNA agent comprises a sense strand and an antisense strand forming a double stranded region,
wherein the nucleotide sequence of the sense strand differs by no more than 4 bases from the nucleotide sequence of 5′-csasagagUfaUfUfCfcauuuuuacu-3′ and the nucleotide sequence of the antisense strand differs by no more than 4 bases from the nucleotide sequence of 5′-asGfsuaaAfaauggaaUfaCfucuugsgsu-3′,
wherein a, c, g, and u are 2′-O-methyl (2′-OMe) A, C, G, and U, respectively; Af, Cf, Gf and Uf are 2′-fluoro A, C, G and U, respectively; s is a phosphorothioate linkage, and
wherein at least one strand is conjugated to a ligand.

2. The dsRNA agent, or salt thereof, of claim 1, wherein the nucleotide sequence of the sense strand differs by no more than 3 bases from the nucleotide sequence of 5′-csasagagUfaUfUfCfcauuuuuacu-3′ and the nucleotide sequence of the antisense strand differs by no more than 3 bases from the nucleotide sequence of 5′-asGfsuaaAfaauggaaUfaCfucuugsgsu-3′.

3. The dsRNA agent, or salt thereof, of claim 1, wherein the nucleotide sequence of the sense strand differs by no more than 2 bases from the nucleotide sequence of 5′-csasagagUfaUfUfCfcauuuuuacu-3′ and the nucleotide sequence of the antisense strand differs by no more than 2 bases from the nucleotide sequence of 5′-asGfsuaaAfaauggaaUfaCfucuugsgsu-3′.

4. The dsRNA agent, or salt thereof, of claim 1, wherein the nucleotide sequence of the sense strand differs by no more than 1 base from the nucleotide sequence of 5′-csasagagUfaUfUfCfcauuuuuacu-3′ and the nucleotide sequence of the antisense strand differs by no more than 1 base from the nucleotide sequence of 5′-asGfsuaaAfaauggaaUfaCfucuugsgsu-3′.

5. The dsRNA agent, or salt thereof, of claim 1, wherein the ligand is conjugated to the 3′ end of the sense strand of the dsRNA agent.

6. The dsRNA agent, or salt thereof, of claim 1, wherein the ligand is an N-acetylgalactosamine (GalNAc) derivative.

7. The dsRNA agent, or salt thereof, of claim 1, wherein the ligand is one or more GalNAc derivatives attached through a monovalent, bivalent, or trivalent branched linker.

8. The dsRNA agent, or salt thereof, of claim 7, wherein the ligand is

[chemical structure]

9. The dsRNA agent, or salts thereof, of claim 8, wherein the dsRNA agent is conjugated to the ligand as shown in the following schematic [chemical structure]
and, wherein X is O or S.

10. The dsRNA agent, or salt thereof, of claim 9, wherein the X is O.

11. A double stranded ribonucleic acid (dsRNA) agent, or salt thereof, for inhibiting expression of transthyretin (TTR) in a cell,
wherein the dsRNA agent comprises a sense strand and an antisense strand forming a double stranded region,
wherein the sense strand comprises the nucleotide sequence of 5′-csasagagUfaUfUfCfcauuuuuacu-3′ and the antisense strand comprises the nucleotide sequence of 5′-asGfsuaaAfaauggaaUfaCfucuugsgsu-3′,
wherein a, c, g, and u are 2′-O-methyl (2′-OMe) A, C, G, and U, respectively; Af, Cf, Gf and Uf are 2′-fluoro A, C, G and U, respectively; s is a phosphorothioate linkage, and
wherein at least one strand is conjugated to a ligand.

12. The dsRNA agent, or salt thereof, of claim 11, wherein the sense strand consists of the nucleotide sequence of 5′-csasagagUfaUfUfCfcauuuuuacu-3′ and the antisense strand consists of the nucleotide sequence of 5′-asGfsuaaAfaauggaaUfaCfucuugsgsu-3′.

13. The dsRNA agent, or salt thereof, of claim 11, wherein the ligand is conjugated to the 3′ end of the sense strand of the dsRNA agent.

14. The dsRNA agent, or salt thereof, of claim 11, wherein the ligand is an N-acetylgalactosamine (GalNAc) derivative.

15. The dsRNA agent, or salt thereof, of claim 11, wherein the ligand is one or more GalNAc derivatives attached through a monovalent, bivalent, or trivalent branched linker.

16. The dsRNA agent, or salt thereof, of claim 15, wherein the ligand is

[chemical structure]

17. The dsRNA agent, or salt thereof, of claim 16, wherein the dsRNA agent is conjugated to the ligand as shown in the following schematic [chemical structure]
and, wherein X is O or S.

18. The dsRNA agent, or salt thereof, of claim 17, wherein the X is O.

19. A double stranded ribonucleic acid (dsRNA) agent, or salt thereof, for inhibiting expression of transthyretin (TTR) in a cell,
wherein the dsRNA agent comprises a sense strand and an antisense strand forming a double stranded region,
wherein the sense strand comprises the nucleotide sequence of 5′-csasagagUfaUfUfCfcauuuuuacu-3′ and the antisense strand comprises the nucleotide sequence of 5′-asGfsuaaAfaauggaaUfaCfucuugsgsu-3′,
wherein a, c, g, and u are 2′-O-methyl (2′-OMe) A, C, G, and U, respectively; Af, Cf, Gf and Uf are 2′-fluoro A, C, G and U, respectively; s is a phosphorothioate linkage, and
wherein the dsRNA agent is conjugated to a ligand as shown in the following schematic [chemical structure]
wherein X is O.

20. The dsRNA agent, or salt thereof, of claim 19, wherein the sense strand consists of the nucleotide sequence of 5′-csasagagUfaUfUfCfcauuuuuacu-3′ and the antisense strand consists of the nucleotide sequence of 5′-asGfsuaaAfaauggaaUfaCfucuugsgsu-3′.

21. A cell containing the dsRNA agent, or salt thereof, of claim 1.

22. A pharmaceutical composition for inhibiting expression of a gene encoding transthyretin (TTR) comprising the dsRNA agent, or salt thereof, of claim 1 and a pharmaceutically acceptable carrier.

23. The pharmaceutical composition of claim 22, wherein dsRNA agent, or salt thereof, is in an unbuffered solution.

24. The pharmaceutical composition of claim 23, wherein the unbuffered solution is saline or water.

25. The pharmaceutical composition of claim 22, wherein the dsRNA agent, or salt thereof, is in a buffer solution.

26. The pharmaceutical composition of claim 25, wherein the buffer solution comprises acetate, citrate, prolamine, carbonate, or phosphate or any combination thereof.

27. The pharmaceutical composition of claim 25, wherein the buffer solution is phosphate buffered saline (PBS).

28. The pharmaceutical composition of claim 22, wherein dsRNA agent is in a salt form.

29. The pharmaceutical composition of claim 22, wherein dsRNA agent is in a sodium salt form.

30. The pharmaceutical composition of claim 22, wherein dsRNA agent is in a free acid form.
